(19) United States
(12) Patent Application Publication
(10) Pub. No.: US 2023/0235332 A1
(43) Pub. Date: Jul. 27, 2023

(54) TREATMENT OF NEUROLOGICAL DISEASES USING MODULATORS OF GENE TRANSCRIPTS

(71) Applicant: QURALIS CORPORATION, Cambridge, MA (US)

(72) Inventors: Daniel Elbaum, Newton, MA (US); Sandra Hinckley, Sudbury, MA (US)

(21) Appl. No.: 17/928,708

(22) PCT Filed: Jun. 3, 2021
(86) PCT No.: PCT/US2021/035603

§ 371 Date: Nov. 30, 2022

Related U.S. Application Data
(60) Provisional application No. 63/033,926, filed on Jun. 3, 2020.
(60) Provisional application No. 63/119,717, filed on Dec. 1, 2020.

(51) Int. Cl. C12N 15/113; A61K 45/06; A61P 25/28

(52) U.S. Cl. CPC C12N 15/1136; A61K 45/06; A61P 25/28; C12N 2310/3231; C12N 2310/321; C12N 2310/315; C12N 2310/311; C12N 2310/314; C12N 2310/312

(57) ABSTRACT

Disclosed herein are STMN2 oligonucleotides with one or more spacers. In various embodiments, STMN2 oligonucleotides with spacer(s) reduce STMN2 transcripts with cryptic exon and increase full length STMN2 transcripts, thereby imparting therapeutic efficacy against neurological diseases such as amyotrophic lateral sclerosis (ALS), frontotemporal dementia (FTD), or Alzheimer's disease (AD).

### FIELD OF THE DISCLOSURE

[0001] This application relates generally to methods of treating neurological diseases with antisense oligonucleotides, in particular, antisense oligonucleotides with one or more spacers that target a transcript.

### CROSS REFERENCE TO RELATED APPLICATIONS

[0002] This application claims the benefit of and priority to U.S. Provisional Patent Application No. 63/033,926 filed on Jun. 3, 2020 and U.S. Provisional Patent Application No. 63/119,717 filed on Dec. 1, 2020, the entire disclosure of each of which is hereby incorporated by reference in its entirety for all purposes.

### SEQUENCE LISTING

[0003] The instant application contains a Sequence Listing which has been submitted electronically in ASCII format and is hereby incorporated by reference in its entirety. Said ASCII copy, created on May 28, 2021, is named QRL-006WO_SL.txt and is 510,394 bytes in size.

### BACKGROUND

[0004] Motor neuron diseases are a class of neurological diseases that result in the degeneration and death of motor neurons—those neurons which coordinate voluntary movement of muscles by the brain. Motor neuron diseases may be sporadic or inherited, and may affect upper motor neurons and/or lower motor neurons. Motor neuron diseases include amyotrophic lateral sclerosis, progressive bulbar palsy, pseudobulbar palsy, primary lateral sclerosis, progressive muscular atrophy, spinal muscular atrophy, and post-polio syndrome.

[0005] Amyotrophic lateral sclerosis (ALS) is a group of motor neuron diseases affecting about 15,000 individuals in the United States of America. ALS is characterized by degeneration and death of upper and lower motor neurons, resulting in loss of voluntary muscle control. Motor neuron death is accompanied by muscle fasciculation and atrophy. Early symptoms of ALS include muscle cramps, muscle spasticity, muscle weakness (for example, affecting an arm, a leg, neck, or diaphragm), slurred and nasal speech, and difficulty chewing or swallowing. Loss of strength and control over movements, including those necessary for speech, eating, and breathing, eventually occur. Disease progression may be accompanied by weight loss, malnourishment, anxiety, depression, increased risk of pneumonia, muscle cramps, neuropathy, and possibly dementia. Most individuals diagnosed with ALS die of respiratory failure within five years of the first appearance of symptoms. Currently, there is no effective treatment for ALS.

[0006] ALS occurs in individuals of all ages, but is most common in individuals between 55 to 75 years of age, with a slightly higher incidence in males. ALS can be characterized as sporadic or familial. Sporadic ALS appears to occur at random and accounts for more than 90% of all incidences of ALS. Familial ALS accounts for 5-10% of all incidences of ALS.

[0007] FTD refers to a spectrum of progressive neurodegenerative diseases caused by loss of neurons in frontal and temporal lobes of the brain. FTD is the third most common form of dementia (following Alzheimer's disease and dementia with Lewy bodies), and the second most common form of dementia in individuals below 65 years of age. FTD is estimated to affect 20,000 to 30,000 individuals in the United States of America. FTD is characterized by changes in behavior and personality, and language dysfunction. Forms of FTD include behavioral variant FTD (bvFTD), semantic variant primary progressive aphasia (svPPA), and nonfluent variant primary progressive aphasia (nfvPPA). ALS with FTD is characterized by symptoms associated with FTD, along with symptoms of ALS such as muscle weakness, atrophy, fasciculation, spasticity, speech impairment (dysarthria), and inability to swallow (dysphagia). Individuals usually succumb to FTD within 5 to 10 years, while ALS with FTD often results in death within 2 to 3 years of the first disease symptoms appearing.

[0008] Like ALS, there is no known cure for FTD, or ALS with FTD, nor a therapeutic known to prevent or retard either disease's progression.

[0009] Thus, there is a pressing need to identify compounds and/or compositions capable of preventing, ameliorating, and neurological diseases such as: amyotrophic lateral sclerosis (ALS), frontotemporal dementia (FTD), ALS with FTD, Alzheimer's disease (AD), Parkinson's disease (PD), Huntington's disease, progressive supranuclear palsy (PSP), brain trauma, spinal cord injury, corticobasal degeneration (CBD), nerve injuries (e.g., brachial plexus injuries), neuropathies (e.g., chemotherapy induced neuropathy), and TDP43 proteinopathies (e.g., chronic traumatic encephalopathy, Perry Syndrome, Dementia with Lewy body in association with Alzheimer's disease, Parkinson's disease with or without dementia, and Limbic-predominant age-related TDP-43 encephalopathy (LATE)).

[0010] RNA-binding protein transactive response DNA-binding protein 43 (TDP-43) is involved in fundamental RNA processing activities including RNA transcription, splicing, and transport. TDP-43 binds to thousands of pre-messenger RNA/mRNA targets, with high affinity for GU-rich sequences, including autoregulation of its own mRNA via binding to 3′ untranslated region. Reduction in TDP-43 from an otherwise normal adult nervous system alters the splicing or expression levels of more than 1,500 RNAs, including long intron-containing transcripts. See Melamed et al., Nat Neurosci. (2019), 22(2):180-190.

[0011] In affected neurons in most instances of ALS and approximately 45% of patients with FTD, cytoplasmic accumulation and nuclear loss of TDP-43 have been reported. See Melamed et al., Nat Neurosci. (2019), 22(2):180-190. Moreover, TDP-43 has been shown to regulate expression of the neuronal growth-associated factor Stathmin-2 (STMN2). See Melamed (2019); see also Klim et al., Nat Neurosci. (2019), 22(2):167-179. STMN2 encodes a protein necessary for normal motor neuron outgrowth and repair. See Melamed (2019); see also Klim (2019). TDP-43 disruption is shown to drive premature polyadenylation and aberrant splicing in intron 1 of stathmin-2 pre-mRNA, producing a non-functional mRNA. See Melamed (2019).

### SUMMARY

[0012] Described herein are oligonucleotides comprising one or more spacers and comprising a sequence that is between 85 and 98% complementary to an equal length portion of a STMN2 transcript. In one aspect, the present disclosure provides STMN2 oligonucleotides that target a STMN2 transcript (for example, a STMN2 transcript comprising a cryptic exon). In various embodiments, the oligonucleotides target a transcript for the treatment of neurological diseases, including motor neuron diseases, and/or neuropathies. For example, STMN2 oligonucleotides can be used to treat PD, ALS, FTD, and ALS with FTD.

[0013] In one aspect the present disclosure provides a compound comprising a modified oligonucleotide comprising a sequence that is between 85 and 98% complementary to an equal length portion of any one of SEQ ID NO: 1339 or SEQ ID NO: 1341, a sequence having 90% identity thereof, or to a 15 to 50 contiguous nucleobase portion thereof, wherein at least one (i.e., one or more) nucleoside linkage of the oligonucleotide is a non-natural linkage, and further wherein the oligonucleotide comprises a spacer. In various embodiments, the oligonucleotide comprises a segment with at most 11 linked nucleosides. In various embodiments, the oligonucleotide comprises a segment with at most 10, 9, or 8 linked nucleosides. In various embodiments, the oligonucleotide comprises a segment with at most 7 linked nucleosides. In certain embodiments, the oligonucleotide comprises a segment with at most 6, 5, 4, 3, or 2 linked nucleosides. In certain embodiments, every segment of the oligonucleotide comprises at most 7 linked nucleosides.

[0014] In various embodiments, the oligonucleotide comprises a sequence that shares at least 85% identity with an equal length portion of any one of SEQ ID NOs: 1-466, SEQ ID NOs: 893-1338, SEQ ID NOs: 1342-1366, or SEQ ID NOs: 1392-1664. In various embodiments, the oligonucleotide comprises a sequence that shares at least 90% identity with an equal length portion of any one of SEQ ID NOs: 1-466, SEQ ID NOs: 893-1338, SEQ ID NOs: 1342-1366, or SEQ ID NOs: 1392-1664. In various embodiments, the oligonucleotide comprises a sequence that shares 95% identity with an equal length portion of any one of SEQ ID NOs: 1451-1664. In various embodiments, the oligonucleotide comprises a sequence that shares 100% identity with an equal length portion of any one of SEQ ID NOs: 1451-1664.

[0015] In various embodiments, the oligonucleotide comprises a segment with at most 11 linked nucleosides or at most 7 linked nucleosides, and wherein the oligonucleotide comprises a sequence that is between 85 and 98% complementary to an equal length portion within any one of positions 144-168, 173-197, 185-209, or 237-261 of SEQ ID NO: 1339. In various embodiments, the oligonucleotide comprises a segment with at most 11 linked nucleosides or at most 7 linked nucleosides, and wherein the oligonucleotide comprises a sequence that is between 85 and 98% complementary to an equal length portion of nucleobases within any one of positions 144-164, 144-166, 145-167, 146-166, 146-168, 147-165, or 148-168 of SEQ ID NO: 1339. In various embodiments, the oligonucleotide comprises a segment with at most 11 linked nucleosides or at most 7 linked nucleosides, and wherein the oligonucleotide comprises a sequence that is between 85 and 98% complementary to an equal length portion of nucleobases within any one of positions 173-191, 173-193, 173-195, 173-197, 175-195, 175-197, 177-197, or 179-197 of SEQ ID NO:

[0016] 1339.

[0017] In various embodiments, the oligonucleotide comprises a segment with at most 11 linked nucleosides or at most 7 linked nucleosides, and wherein the oligonucleotide comprises a sequence that is between 85 and 98% complementary to an equal length portion of nucleobases within any one of positions 185-205, 187-209, 189-209, or 191-209 of SEQ ID NO: 1339. In various embodiments, the oligonucleotide comprises a segment with at most 11 linked nucleosides or at most 7 linked nucleosides, and wherein the oligonucleotide comprises a sequence that is between 85 and 98% complementary to an equal length portion of nucleobases within any one of positions 237-255, 237-259, 239-259, 239-261, 241-261, or 243-261 of SEQ ID NO: 1339. In various embodiments, the oligonucleotide comprises a segment with at most 6, 5, 4, 3, or 2 linked nucleosides, and wherein the oligonucleotide comprises a sequence that is between 85 and 98% complementary to an equal length portion of nucleobases within any one of positions 144-168, 173-197, 185-209, or 237-261 of SEQ ID NO: 1339.

[0018] In various embodiments, the oligonucleotide comprises a segment with at most 6, 5, 4, 3, or 2 linked nucleosides, and wherein the oligonucleotide comprises a sequence that is between 85 and 98% complementary to an equal length portion of nucleobases within any one of positions 144-164, 144-166, 145-167, 146-166, 146-168, 147-165, 148-168, 173-191, 173-193, 173-195, 173-197, 175-195, 175-197, 177-197, 179-197, 185-205, 187-209, 189-209, 191-209, 237-255, 237-259, 239-259, 239-261, 241-261, or 243-261 of SEQ ID NO: 1339. In various embodiments, the oligonucleotide comprises a segment with at most 11 linked nucleosides or at most 7 linked nucleosides, and wherein the oligonucleotide comprises a sequence that shares at least 85% identity with an equal length portion of any one of SEQ ID NOs: 1-466, SEQ ID NOs: 893-1338, SEQ ID NOs: 1342-1366, or SEQ ID NOs: 1392-1664. In various embodiments, the oligonucleotide comprises a segment with at most 6, 5, 4, 3, or 2 linked nucleosides, and wherein the oligonucleotide comprises a sequence that shares at least 85% identity with an equal length portion of any one of SEQ ID NOs: 36, 55, 144, 173, 177, 181, 185, 197, 203, 209, 215, 237, 244, 252, 380, 385, 390, 395, 400, 928, 947, 1036, 1065, 1069, 1073, 1077, 1089, 1095, 1101, 1107, 1129, 1136, 1144, 1272, 1277, 1282, 1287, or 1292. In various embodiments, the oligonucleotide comprises a segment with at most 6, 5, 4, 3, or 2 linked nucleosides, and wherein the oligonucleotide comprises a sequence that shares at least 90% identity with an equal length portion of any one of SEQ ID NOs: 36, 55, 144, 173, 177, 181, 185, 197, 203, 209, 215, 237, 244, 252, 380, 385, 390, 395, 400, 928, 947, 1036, 1065, 1069, 1073, 1077, 1089, 1095, 1101, 1107, 1129, 1136, 1144, 1272, 1277, 1282, 1287, or 1292.

[0019] In various embodiments, the oligonucleotide is at least 18, at least 19, at least 20, at least 21, at least 22, at least 23, at least 24, or at least 25 oligonucleotide units in length. In various embodiments, the oligonucleotide is at least 19 oligonucleotide units in length. In various embodiments, the spacer is a nucleoside-replacement group comprising a non-sugar substitute that is incapable of linking to a nucleotide base.

[0020] In various embodiments, the spacer is located between positions 10 and 15 of the oligonucleotide. In various embodiments, the spacer is located between positions 7 and 11 of the oligonucleotide. In various embodiments, the oligonucleotide further comprises a second spacer, wherein the second spacer is located between positions 14 and 22 of the oligonucleotide. In various embodiments, the spacer and the second spacer are separated by at least 5 nucleobases, at least 6 nucleobases, or at least 7 nucleobases in the oligonucleotide. In various embodiments, the spacer is located between positions 7 and 9 of the oligonucleotide, and wherein the second spacer is located between positions 15 and 18 of the oligonucleotide. In various embodiments, the spacer is located at position 8 of the oligonucleotide, and wherein the second spacer is located at position 16 of the oligonucleotide. In various embodiments, the oligonucleotide further comprises a third spacer, wherein the third spacer is located between positions 21 and 24 of the oligonucleotide.

[0021] In various embodiments, the spacer is located between positions 2 and 5 of the oligonucleotide. In various embodiments, the oligonucleotide further comprises a second spacer, wherein the second spacer is located between positions 8 and 12 of the oligonucleotide. In various embodiments, the oligonucleotide further comprises a third spacer, wherein the third spacer is located between positions 18 and 22 of the oligonucleotide. In various embodiments, the oligonucleotide further comprises a second spacer and a third spacer, wherein the three spacers are located at positions in the oligonucleotide such that each segment of the oligonucleotide has at most 7 linked nucleosides. In various embodiments, at least two of the three spacers are adjacent to a guanine nucleobase. In various embodiments, each of the at least two of the three spacers immediately precede a guanine nucleobase.

[0022] In various embodiments, each of the first, second or third spacers is a nucleoside-replacement group comprising a non-sugar substitute wherein the non-sugar substitute does not contain a ketone, aldehyde, ketal, hemiketal, acetal, hemiacetal, aminal or hemiaminal moiety and is incapable of forming a covalent bond with a nucleotide base.

[0023] In certain embodiments, each of the first, second or third spacers is independently represented by Formula (X), wherein:

[chemical structure]

[0024] Ring A is an optionally substituted 4-8 member monocyclic cycloalkyl group or a 4-8 member monocyclic heterocyclyl group, wherein the heterocyclyl group contains 1 or 2 heteroatoms selected from O, S and N, provided that A is not capable of forming a covalent bond to a nucleobase; and

[0025] the

[chemical structure]

symbol represents the point of connection to an internucleoside linkage.

[0026] In various embodiments, each of the first, second or third spacers is independently represented by Formula (Xa), wherein:

[chemical structure]

[0027] In some embodiments, ring A is an optionally substituted 4-8 member monocyclic cycloalkyl group selected from cyclobutyl, cyclopentyl, cyclohexyl, cycloheptyl and cyclooctyl; or a 4-8 member monocyclic heterocyclyl group, selected from oxetanyl, tetrahydrofuranyl, tetrahydropyranyl, 1,4-dioxanyl, pyrolidinyl, piperidinyl, piperazinyl, morpholinyl and azepanyl.

[0028] In further embodiments, ring A is tetrahydrofuranyl.

[0029] In other embodiments, ring A is tetrahydropyranyl.

[0030] In various embodiments, each of the first, second or third spacers is independently represented by Formula I, wherein:

[chemical structure]

[0031] X is selected from —CH₂— and —O—; and

[0032] n is 0, 1, 2 or 3.

[0033] In various embodiments, each of the first, second or third spacers is independently represented by Formula I′, wherein:

[chemical structure]

[0034] X is selected from —CH₂— and —O—; and

[0035] n is 0, 1, 2 or 3.

[0036] In various embodiments, each of the first, second or third spacers is independently represented by Formula (Ia), wherein:

[chemical structure]

and

[0037] n is 0, 1, 2 or 3.

[0038] In various embodiments, each of the first, second or third spacers is independently represented by Formula (Ia′), wherein:

[chemical structure]

and

[0039] n is 0, 1, 2 or 3.

[0040] In certain embodiments, each of the first, second or third spacers is independently represented by Formula II, wherein:

[chemical structure]

and

[0041] X is selected from —CH₂— and —O—.

[0042] In further embodiments, each of the first, second or third spacers is independently represented by Formula II′, wherein:

[chemical structure]

and

[0043] X is selected from —CH₂— and

[0044] In various embodiments, each of the first, second or third spacers is independently represented by Formula (IIa), wherein:

[chemical structure]

[0045] In further embodiments, each of the first, second or third spacers is independently represented by Formula (IIa′), wherein:

[chemical structure]

[0046] In various embodiments, each of the first, second or third spacers is independently represented by Formula III, wherein:

[chemical structure]

and

[0047] X is selected from —CH₂— and —O—.

[0048] In further embodiments, each of the first, second or third spacers is independently represented by Formula III′, wherein:

[chemical structure]

and

[0049] X is selected from —CH₂— and —O—.

[0050] In some embodiments, each of the first, second or third spacers is independently represented by Formula (IIIa), wherein:

[chemical structure]

[0051] In further embodiments, each of the first, second or third spacers is independently represented by Formula (IIIa′), wherein:

[chemical structure]

[0052] In various embodiments, the oligonucleotide comprising the spacer has a GC content of at least 10%. In various embodiments, the oligonucleotide comprising the spacer has a GC content of at least 20%. In various embodiments, the oligonucleotide comprising the spacer has a GC content of at least 25%. In various embodiments, the oligonucleotide comprising the spacer has a GC content of at least 30%. In various embodiments, the oligonucleotide comprising the spacer has a GC content of at least 40%. In various embodiments, the oligonucleotide comprising the spacer has a GC content of at least 50%.

[0053] In various embodiments, the oligonucleotide is between 12 and 40 oligonucleotide units in length.

[0054] In various embodiments, at least one (i.e., one or more) nucleoside linkage of the oligonucleotide is independently selected from the group consisting of a phosphodiester linkage, a phosphorothioate linkage, an alkyl phosphate linkage, a phosphorodithioate linkage, a phosphotriester linkage, an alkylphosphonate linkage, a 3-methoxypropyl phosphonate linkage, a methylphosphonate linkage, an aminoalkylphosphotriester linkage, an alkylene phosphonate linkage, a phosphinate linkage, a phosphoramidate linkage, a phosphoramidothioate linkage, a thiophosphorodiamidate linkage, a phosphorodiamidate (e.g., comprising a phosphorodiamidate morpholino (PMO), 3′ amino ribose, or 5′ amino ribose) linkage, an aminoalkylphosphoramidate linkage, a thiophosphoramidate linkage, a thionoalkylphosphonate linkage, a thionoalkylphosphotriester linkage, a thiophosphate linkage, a selenophosphate linkage, and a boranophosphate linkage.

[0055] In various embodiments, one or more nucleoside linkages that link a base at position 3 or position 4 of the oligonucleotide are phosphodiester linkages. In various embodiments, only one nucleoside linkage that links a base at position 3 or position 4 of the oligonucleotide is a phosphodiester linkage. In various embodiments, nucleoside linkages that link bases at both position 3 and position 4 of the oligonucleotide are phosphodiester linkages. In various embodiments, one or more bases immediately preceding a spacer in the oligonucleotide are linked through phosphodiester bonds. In various embodiments, only the base immediately preceding the spacer in the oligonucleotide is linked to the spacer through a phosphodiester bond. In various embodiments, the base immediately preceding the spacer in the oligonucleotide is further linked to a further preceding base through a phosphodiester bond. In various embodiments, the oligonucleotide comprises a second spacer, wherein a base immediately preceding the second spacer is linked to a further preceding base through a phosphodiester bond.

[0056] In various embodiments, one or more bases immediately succeeding a spacer in the oligonucleotide are linked through phosphodiester bonds. In various embodiments, only the base immediately succeeding the spacer in the oligonucleotide is linked to the spacer through a phosphodiester bond. In various embodiments, two bases immediately preceding the spacer in the oligonucleotide are linked through phosphodiester bonds. In various embodiments, one or more bases immediately preceding a spacer in the oligonucleotide are linked through phosphodiester bonds and wherein one or more bases immediately succeeding the spacer in the oligonucleotide are linked through phosphodiester bonds. In various embodiments, one base immediately preceding the spacer and one base immediately succeeding the spacer are linked through phosphodiester bonds. In various embodiments, the oligonucleotide includes a second spacer, and wherein one or more bases immediately preceding the second spacer in the oligonucleotide are linked through phosphodiester bonds and wherein one or more bases immediately succeeding the second spacer in the oligonucleotide are linked through phosphodiester bonds. In various embodiments, one base immediately preceding the second spacer and one base immediately succeeding the second spacer are linked through phosphodiester bonds. In various embodiments, the oligonucleotide comprises a range of bases that are linked through phosphodiester bonds, the range of bases comprising at least two bases. In various embodiments, the oligonucleotide comprises a range of bases that are linked through phosphodiester bonds, the range of bases comprising at least five bases. In various embodiments, the oligonucleotide comprises two or more spacers, and wherein the range of bases are positioned between the at least two spacers.

[0057] Additionally disclosed herein is a compound comprising an oligonucleotide comprising a nucleobase sequence that shares at least 90% identity to an equal length portion of any one of SEQ ID NOs: 1-466, SEQ ID NOs: 893-1338, SEQ ID NOs: 1342-1366, or SEQ ID NOs: 1392-1664. Additionally disclosed herein is an oligonucleotide comprising a nucleobase sequence that shares at least 90% identity to an equal length portion of any one of SEQ ID NOs: 1-466, SEQ ID NOs: 893-1338, SEQ ID NOs: 1342-1366, or SEQ ID NOs: 1392-1664. In various embodiments, the nucleobase sequence shares at least 95% identity to an equal length portion of any one of SEQ ID NOs: 1-466, SEQ ID NOs: 893-1338, SEQ ID NOs: 1342-1366, or SEQ ID NOs: 1392-1664. In various embodiments, the nucleobase sequence shares at least 100% identity to an equal length portion of any one of SEQ ID NOs: 1-466, SEQ ID NOs: 893-1338, SEQ ID NOs: 1342-1366, or SEQ ID NOs: 1392-1664. In various embodiments, the oligonucleotide is any one of a 19mer, 21mer, 23mer, or 25mer.

[0058] In various embodiments, an internucleoside linkage of the oligonucleotide is a modified internucleoside linkage. In various embodiments, the modified internucleoside linkage of the oligonucleotide is a phosphorothioate linkage. In various embodiments, all internucleoside linkages of the oligonucleotide are phosphorothioate linkages. In various embodiments, the phosphorothioate linkage is in one of a Rp configuration or a Sp configuration. In various embodiments, the oligonucleotide comprises at least one modified sugar moiety. In various embodiments, the modified sugar moiety is one of a 2′-OMe modified sugar moiety, bicyclic sugar moiety, 2′-O-(2-methoxyethyl) (MOE), 2′-deoxy-2′-fluoro nucleoside, 2′-fluoro-β-D-arabinonucleoside, locked nucleic acid (LNA), a tricyclic nucleic acid, constrained ethyl 2′-4′-bridged nucleic acid (cEt), S-cEt, tcDNA, hexitol nucleic acids (HNA), and tricyclic analog (e.g., tcDNA).

[0059] In various embodiments, the oligonucleotide exhibits at least a 30%, 40%, 50%, 60%, 70%, 80%, or 90% increase of full length STMN2 protein. In various embodiments, the oligonucleotide exhibits at least a 100% increase of full length STMN2 protein. In various embodiments, the oligonucleotide exhibits at least a 200% increase of full length STMN2 protein. In various embodiments, the oligonucleotide exhibits at least a 300% increase of full length STMN2 protein. In various embodiments, the oligonucleotide exhibits at least a 400% increase of full length STMN2 protein. In various embodiments, increase of the full length STMN2 protein is measured in comparison to a reduced level of full length STMN2 protein achieved using a TDP43 antisense oligonucleotide. In various embodiments, the oligonucleotide exhibits at least a 10%, 20%, 30%, 40%, 50%, 60%, 70%, 80%, 90%, or 100% rescue of full length STMN2 protein. In various embodiments, the oligonucleotide exhibits at least a 50%, 60%, 70%, 80%, or 90% reduction of a STMN2 transcript with a cryptic exon.

[0060] Additionally disclosed is a method of treating a neurological disease and/or a neuropathy in a patient in need thereof, the method comprising administering to the patient an oligonucleotide of any of the oligonucleotides disclosed above. In various embodiments, the neurological disease selected from the group consisting of: amyotrophic lateral sclerosis (ALS), frontotemporal dementia (FTD), ALS with FTD, Alzheimer's disease (AD), Parkinson's disease (PD), Huntington's disease, progressive supranuclear palsy (PSP), brain trauma, spinal cord injury, corticobasal degeneration (CBD), nerve injuries (e.g., brachial plexus injuries), neuropathies (e.g., chemotherapy induced neuropathy), and TDP43 proteinopathies (e.g., chronic traumatic encephalopathy, Perry Syndrome, Dementia with Lewy body in association with Alzheimer's disease, Parkinson's disease with or without dementia, and Limbic-predominant age-related TDP-43 encephalopathy (LATE)). In various embodiments, the neurological disease is ALS. In various embodiments, the neurological disease is FTD. In various embodiments, the neurological disease is ALS with FTD. In various embodiments, the neuropathy is chemotherapy induced neuropathy.

[0061] Additionally disclosed is a method of restoring axonal outgrowth and/or regeneration of a neuron, the method comprising exposing the motor neuron to an oligonucleotide of any of the oligonucleotides disclosed above. Additionally disclosed is a method of increasing, promoting, stabilizing, or maintaining STMN2 expression and/or function in a neuron, the method comprising exposing the cell to an oligonucleotide of any of the oligonucleotides disclosed above.

[0062] In various embodiments, the neuron is a neuron of a patient in need of treatment of a neurological disease and/or a neuropathy. In various embodiments, the neuropathy is chemotherapy induced neuropathy. In various embodiments, the exposing is performed in vivo or ex vivo. In various embodiments, the exposing comprises administering the oligonucleotide to a patient in need thereof. In various embodiments, the oligonucleotide is administered topically, parenterally, intrathecally, intrathalamically, intracisternally, orally, rectally, buccally, sublingually, vaginally, pulmonarily, intratracheally, intranasally, transdermally, or intraduodenally. In various embodiments, the oligonucleotide is administered orally. In various embodiments, a therapeutically effective amount of the oligonucleotide is administered intrathecally, intrathalamically or intracisternally. In various embodiments, the patient is a human.

[0063] Additionally disclosed herein is a pharmaceutical composition comprising the oligonucleotide of any one of the oligonucleotides disclosed above, or a pharmaceutically acceptable salt thereof, and a pharmaceutically acceptable excipient. In various embodiments, the pharmaceutical composition is suitable for topical, intrathecal, intrathalamic, intracisternal, intracerebroventricular, parenteral, oral, pulmonary, intratracheal, intranasal, transdermal, rectal, buccal, sublingual, vaginal, or intraduodenal administration.

[0064] Additionally disclosed herein is a method of treating a neurological disease or a neuropathy in a patient in need thereof, the method comprising administering to a patient in need thereof a therapeutically effective amount of a pharmaceutical composition disclosed above. In various embodiments, the neurological disease is selected from the group consisting of amyotrophic lateral sclerosis (ALS), frontotemporal dementia (FTD), ALS with FTD, Alzheimer's disease (AD), Parkinson's disease (PD), Huntington's disease, progressive supranuclear palsy (PSP), brain trauma, spinal cord injury, corticobasal degeneration (CBD), nerve injuries (e.g., brachial plexus injuries), neuropathies (e.g., chemotherapy induced neuropathy), and TDP43 proteinopathies (e.g., chronic traumatic encephalopathy, Perry Syndrome, Dementia with Lewy body in association with Alzheimer's disease, Parkinson's disease with or without dementia, and Limbic-predominant age-related TDP-43 encephalopathy (LATE)). In various embodiments, the neurological disease is ALS. In various embodiments, the neurological disease is FTD. In various embodiments, the neurological disease is ALS with FTD. In various embodiments, the neuropathy is chemotherapy induced neuropathy. In various embodiments, the pharmaceutical composition is administered topically, parenterally, orally, pulmonarily, rectally, buccally, sublingually, vaginally, intratracheally, intranasally, intracisternally, intrathecally, intrathalamically, intravenously, intramuscularly, transdermally, or intraduodenally. In various embodiments, wherein the pharmaceutical composition is administered intrathecally, intrathalamically intracerebroventricularly, or intracisternally. In various embodiments, a therapeutically effective amount of the oligonucleotide is administered intrathecally, intrathalamically or intracisternally. In various embodiments, the patient is human.

[0065] Additionally disclosed herein is a method for treating a neurological disease in a subject in need thereof, the method comprising administering to the subject an oligonucleotide comprising a segment with at most 7 linked nucleosides, and wherein oligonucleotide shares at least 85% identity with any one of SEQ ID NOs: 1-466, SEQ ID NOs: 893-1338, SEQ ID NOs: 1342-1366, or SEQ ID NOs: 1392-1664, or a pharmaceutically acceptable salt thereof; wherein at least one (i.e., one or more) nucleoside linkage of the oligonucleotide is independently selected from the group consisting of: a phosphodiester linkage, a phosphorothioate linkage, an alkyl phosphate linkage, a phosphorodithioate linkage, a phosphotriester linkage, an alkylphosphonate linkage, a 3-methoxypropyl phosphonate linkage, a methylphosphonate linkage, an aminoalkylphosphotriester linkage, an alkylene phosphonate linkage, a phosphinate linkage, a phosphoramidate linkage, a phosphoramidothioate linkage, a thiophosphorodiamidate linkage, a phosphorodiamidate (e.g., comprising a phosphorodiamidate morpholino (PMO), 3′ amino ribose, or 5′ amino ribose) linkage, an aminoalkylphosphoramidate linkage, a thiophosphoramidate linkage, a thionoalkylphosphonate linkage, a thionoalkylphosphotriester linkage, a thiophosphate linkage, a selenophosphate linkage, and a boranophosphate linkage, and/or wherein at least one (i.e., one or more) nucleoside is substituted with a component selected from the group consisting of a 2′-O-(2-methoxyethyl) nucleoside, a 2′-O-methyl nucleoside, a 2′-deoxy-2′-fluoro nucleoside, a 2′-fluoro-β-D-arabinonucleoside, a locked nucleic acid (LNA), a tricyclic nucleic acid, constrained methoxyethyl (cMOE), constrained ethyl (cET), and a peptide nucleic acid (PNA), optionally wherein the oligonucleotide further comprises a spacer.

[0066] Additionally disclosed herein is a method for treating ALS in a subject in need thereof, the method comprising administering to the subject an oligonucleotide comprising a segment with at most 7 linked nucleosides, and wherein oligonucleotide shares at least 85% identity with any one of SEQ ID NOs: 1-466, SEQ ID NOs: 893-1338, SEQ ID NOs: 1342-1366, or SEQ ID NOs: 1392-1664, or a pharmaceutically acceptable salt thereof; wherein at least one (i.e., one or more) nucleoside linkage of the oligonucleotide is independently selected from the group consisting of: a phosphodiester linkage, a phosphorothioate linkage, an alkyl phosphate linkage, a phosphorodithioate linkage, a phosphotriester linkage, an alkylphosphonate linkage, a 3-methoxypropyl phosphonate linkage, a methylphosphonate linkage, an aminoalkylphosphotriester linkage, an alkylene phosphonate linkage, a phosphinate linkage, a phosphoramidate linkage, a phosphoramidothioate linkage, a thiophosphorodiamidate linkage, a phosphorodiamidate (e.g., comprising a phosphorodiamidate morpholino (PMO), 3′ amino ribose, or 5′ amino ribose) linkage, an aminoalkylphosphoramidate linkage, a thiophosphoramidate linkage, a thionoalkylphosphonate linkage, a thionoalkylphosphotriester linkage, a thiophosphate linkage, a selenophosphate linkage, and a boranophosphate linkage, and/or wherein at least one (i.e., one or more) nucleoside is substituted with a component selected from the group consisting of a 2′-O-(2-methoxyethyl) nucleoside, a 2′-O-methyl nucleoside, a 2′-deoxy-2′-fluoro nucleoside, a 2′-fluoro-β-D-arabinonucleoside, locked nucleic acid (LNA), a tricyclic nucleic acid, constrained methoxyethyl (cMOE), constrained ethyl (cET), and a peptide nucleic acid (PNA), optionally wherein the oligonucleotide further comprises a spacer.

[0067] Additionally disclosed herein is a method for treating FTD in a subject in need thereof, the method comprising administering to the subject an oligonucleotide comprising a segment with at most 7 linked nucleosides, and wherein oligonucleotide shares at least 85% identity with any one of SEQ ID NOs: 1-466, SEQ ID NOs: 893-1338, SEQ ID NOs: 1342-1366, or SEQ ID NOs: 1392-1664, or a pharmaceutically acceptable salt thereof; wherein at least one (i.e., one or more) nucleoside linkage of the oligonucleotide is independently selected from the group consisting of: a phosphodiester linkage, a phosphorothioate linkage, an alkyl phosphate linkage, a phosphorodithioate linkage, a phosphotriester linkage, an alkylphosphonate linkage, a 3-methoxypropyl phosphonate linkage, a methylphosphonate linkage, an aminoalkylphosphotriester linkage, an alkylene phosphonate linkage, a phosphinate linkage, a phosphoramidate linkage, a phosphoramidothioate linkage, a thiophosphorodiamidate linkage, a phosphorodiamidate (e.g., comprising a phosphorodiamidate morpholino (PMO), 3′ amino ribose, or 5′ amino ribose) linkage, an aminoalkylphosphoramidate linkage, a thiophosphoramidate linkage, a thionoalkylphosphonate linkage, a thionoalkylphosphotriester linkage, a thiophosphate linkage, a selenophosphate linkage, and a boranophosphate linkage, and/or wherein at least one (i.e., one or more) nucleoside is substituted with a component selected from the group consisting of a 2′-O-(2-methoxyethyl) nucleoside, a 2′-O-methyl nucleoside, a 2′-deoxy-2′-fluoro nucleoside, a 2′-fluoro-β-D-arabinonucleoside, locked nucleic acid (LNA), a tricyclic nucleic acid, constrained methoxyethyl (cMOE), constrained ethyl (cET), and a peptide nucleic acid (PNA), optionally wherein the oligonucleotide further comprises a spacer.

[0068] Additionally disclosed herein is a method for treating ALS with FTD in a subject in need thereof, the method comprising administering to the subject an oligonucleotide comprising a segment with at most 7 linked nucleosides, and wherein oligonucleotide shares at least 85% identity with any one of SEQ ID NOs: 1-466, SEQ ID NOs: 893-1338, SEQ ID NOs: 1342-1366, or SEQ ID NOs: 1392-1664, or a pharmaceutically acceptable salt thereof; wherein at least one (i.e., one or more) nucleoside linkage of the oligonucleotide is independently selected from the group consisting of: a phosphodiester linkage, a phosphorothioate linkage, an alkyl phosphate linkage, a phosphorodithioate linkage, a phosphotriester linkage, an alkylphosphonate linkage, a 3-methoxypropyl phosphonate linkage, a methylphosphonate linkage, an aminoalkylphosphotriester linkage, an alkylene phosphonate linkage, a phosphinate linkage, a phosphoramidate linkage, a phosphoramidothioate linkage, a thiophosphorodiamidate linkage, a phosphorodiamidate (e.g., comprising a phosphorodiamidate morpholino (PMO), 3′ amino ribose, or 5′ amino ribose) linkage, an aminoalkylphosphoramidate linkage, a thiophosphoramidate linkage, a thionoalkylphosphonate linkage, a thionoalkylphosphotriester linkage, a thiophosphate linkage, a selenophosphate linkage, and a boranophosphate linkage, and/or wherein at least one (i.e., one or more) nucleoside is substituted with a component selected from the group consisting of a 2′-O-(2-methoxyethyl) nucleoside, a 2′-O-methyl nucleoside, a 2′-deoxy-2′-fluoro nucleoside, a 2′-fluoro-β-D-arabinonucleoside, locked nucleic acid (LNA), a tricyclic nucleic acid, constrained methoxyethyl (cMOE), constrained ethyl (cET), and a peptide nucleic acid (PNA), optionally wherein the oligonucleotide further comprises a spacer.

[0069] In various embodiments, one or more nucleoside linkages that link a base at position 3 or position 4 of the oligonucleotide are phosphodiester linkages. In various embodiments, only one nucleoside linkage that links a base at position 3 or position 4 of the oligonucleotide is a phosphodiester linkage. In various embodiments, nucleoside linkages that link bases at both position 3 and position 4 of the oligonucleotide are phosphodiester linkages. In various embodiments, one or more bases immediately preceding a spacer in the oligonucleotide are linked through phosphodiester bonds. In various embodiments, only the base immediately preceding the spacer in the oligonucleotide is linked to the spacer through a phosphodiester bond. In various embodiments, the base immediately preceding the spacer in the oligonucleotide is further linked to a further preceding base through a phosphodiester bond. In various embodiments, the oligonucleotide comprises a second spacer, wherein a base immediately preceding the second spacer is linked to a further preceding base through a phosphodiester bond.

[0070] In various embodiments, one or more bases immediately succeeding a spacer in the oligonucleotide are linked through phosphodiester bonds. In various embodiments, only the base immediately succeeding the spacer in the oligonucleotide is linked to the spacer through a phosphodiester bond. In various embodiments, two bases immediately preceding the spacer in the oligonucleotide are linked through phosphodiester bonds. In various embodiments, one or more bases immediately preceding a spacer in the oligonucleotide are linked through phosphodiester bonds and wherein one or more bases immediately succeeding the spacer in the oligonucleotide are linked through phosphodiester bonds. In various embodiments, one base immediately preceding the spacer and one base immediately succeeding the spacer are linked through phosphodiester bonds. In various embodiments, the oligonucleotide includes a second spacer, and wherein one or more bases immediately preceding the second spacer in the oligonucleotide are linked through phosphodiester bonds and wherein one or more bases immediately succeeding the second spacer in the oligonucleotide are linked through phosphodiester bonds. In various embodiments, one base immediately preceding the second spacer and one base immediately succeeding the second spacer are linked through phosphodiester bonds. In various embodiments, the oligonucleotide comprises a range of bases that are linked through phosphodiester bonds, the range of bases comprising at least two bases. In various embodiments, the oligonucleotide comprises a range of bases that are linked through phosphodiester bonds, the range of bases comprising at least five bases. In various embodiments, the oligonucleotide comprises two or more spacers, and wherein the range of bases are positioned between the at least two spacers. In various embodiments, the oligonucleotide is any one of a 19mer, 21mer, 23mer, or 25mer.

[0071] In various embodiments, at least one (i.e., one or more) internucleoside linkage of the oligonucleotide is a phosphorothioate linkage. In various embodiments, all internucleoside linkages of the oligonucleotide are phosphorothioate linkages.

[0072] Additionally disclosed herein is an oligonucleotide and a pharmaceutically acceptable excipient, the oligonucleotide comprising a sequence that is between 85 and 98% complementary to an equal length portion of any one of SEQ ID NO: 1339 or SEQ ID NO: 1341, a sequence having 90% identity thereof, or to a 15 to 50 contiguous nucleobase portion thereof, wherein the oligonucleotide comprises a spacer and wherein the oligonucleotide is capable of increasing, restoring, or stabilizing expression of the STMN2 mRNA capable of translation of a functional STMN2 and/or activity and/or function of STMN2 protein in a cell or a human patient of an immune-mediated demyelinating disease, and wherein the level of increase, restoration, or stabilization of expression and/or activity and/or function is sufficient for use of the oligonucleotide as a medicament for the treatment of the immune-mediated demyelinating disease.

[0073] In various embodiments, the oligonucleotide comprises one or more chiral centers and/or double bonds. In various embodiments, the oligonucleotide exist as stereoisomers selected from geometric isomers, enantiomers, and diastereomers.

[0074] Additionally disclosed herein is a method of treating a neurological disease and/or a neuropathy in a patient in need thereof, the method comprising administering to a patient in need thereof a therapeutically effective amount of a pharmaceutical composition disclosed above, in combination with a second therapeutic agent. In various embodiments, the second therapeutic agent is selected from Riluzole (Rilutek), Edaravone (Radicava), rivastigmine, donepezil, galantamine, selective serotonin reuptake inhibitor, antipsychotic agents, cholinesterase inhibitors, memantine, benzodiazepine antianxiety drugs, AMX0035 (ELYBRIO), ZILUCOPLAN (RA101495), pridopidine, dual AON intrathecal administration (e.g., BIIB067, BIIB078, and BIIB105), BIIB100, levodopa/carbidopa, dopaminergic agents (e.g., ropinirole, pramipexole, rotigotine), medroxyprosterone, KCNQ2/KCNQ3 openers (e.g., retigabine, XEN1101, QRL-101), anticonvulsants and psychostimulant agents, and/or a therapy (e.g., selected from breathing care, physical therapy, occupational therapy, speech therapy, nutritional support), for treating said neurologic disease.

[0075] Additionally disclosed herein is a method of treating a neurological disease and/or a neuropathy in a patient in need thereof, the method comprising administering to a patient in need thereof a therapeutically effective amount of a pharmaceutical composition disclosed above, wherein at least one (i.e., one or more) nucleoside linkage of the oligonucleotide is a non-natural linkage, wherein the oligonucleotide comprises a spacer, and wherein the oligonucleotide further comprises a targeting or conjugate moiety selected from cholesterol, lipoic acid, panthothenic acid, polyethylene glycol, and an antibody for crossing the blood brain barrier.

[0076] In various embodiments, the spacer is a nucleoside-replacement group comprising a non-sugar substitute that is incapable of linking to a nucleotide base. In various embodiments, the spacer is located between positions 10 and 15 of the oligonucleotide. In various embodiments, the spacer is located between positions 7 and 11 of the oligonucleotide. In various embodiments, the oligonucleotide further comprises a second spacer, wherein the second spacer is located between positions 14 and 22 of the oligonucleotide. In various embodiments, the spacer and the second spacer are separated by at least 5 nucleobases, at least 6 nucleobases, or at least 7 nucleobases in the oligonucleotide. In various embodiments, the spacer is located between positions 7 and 9 of the oligonucleotide, and wherein the second spacer is located between positions 15 and 18 of the oligonucleotide. In various embodiments, the spacer is located at position 8 of the oligonucleotide, and wherein the second spacer is located at position 16 of the oligonucleotide.

[0077] In various embodiments, the oligonucleotide further comprises a third spacer, wherein the third spacer is located between positions 21 and 24 of the oligonucleotide. In various embodiments, the spacer is located between positions 2 and 5 of the oligonucleotide. In various embodiments, the oligonucleotide further comprises a second spacer, wherein the second spacer is located between positions 8 and 12 of the oligonucleotide. In various embodiments, the oligonucleotide further comprises a third spacer, wherein the third spacer is located between positions 18 and 22 of the oligonucleotide. In various embodiments, the oligonucleotide further comprises a second spacer and a third spacer, wherein the three spacers are located at positions in the oligonucleotide such that each segment of the oligonucleotide has at most 7 linked nucleosides.

[0078] In various embodiments, at least two of the three spacers are adjacent to a guanine nucleobase. In various embodiments, each of the at least two of the three spacers immediately precede a guanine nucleobase.

[0079] In various embodiments, of the methods described herein, each of the first, second or third spacers is a nucleoside-replacement group comprising a non-sugar substitute wherein the non-sugar substitute does not contain a ketone, aldehyde, ketal, hemiketal, acetal, hemiacetal, aminal or hemiaminal moiety and is incapable of forming a covalent bond with a nucleotide base.

[0080] In certain embodiments, each of the first, second or third spacers is independently represented by Formula (X), wherein:

[chemical structure]

[0081] Ring A is an optionally substituted 4-8 member monocyclic cycloalkyl group or a 4-8 member monocyclic heterocyclyl group, wherein the heterocyclyl group contains 1 or 2 heteroatoms selected from O, S and N, provided that A is not capable of forming a covalent bond to a nucleobase; and

[0082] the

[chemical structure]

symbol represents the point of connection to an internucleoside linkage.

[0083] In various embodiments, each of the first, second or third spacers is independently represented by Formula (Xa), wherein:

[chemical structure]

[0084] In some embodiments, ring A is an optionally substituted 4-8 member monocyclic cycloalkyl group selected from cyclobutyl, cyclopentyl, cyclohexyl, cycloheptyl and cyclooctyl; or a 4-8 member monocyclic heterocyclyl group, selected from oxetanyl, tetrahydrofuranyl, tetrahydropyranyl, 1,4-dioxanyl, pyrolidinyl, piperidinyl, piperazinyl, morpholinyl and azepanyl.

[0085] In further embodiments, ring A is tetrahydrofuranyl.

[0086] In other embodiments, ring A is tetrahydropyranyl.

[0087] In various embodiments, each of the first, second or third spacers is independently represented by Formula (I), wherein:

[chemical structure]

[0088] X is selected from —CH₂— and —O—; and

[0089] n is 0, 1, 2 or 3.

[0090] In various embodiments, the spacer or the second spacer is represented by Formula (I′), wherein:

[chemical structure]

[0091] X is selected from —CH₂— and —O—; and

[0092] n is 0, 1, 2 or 3.

[0093] In various embodiments, each of the first, second or third spacers is independently represented by Formula (Ia), wherein:

[chemical structure]

and

[0094] n is 0, 1, 2 or 3.

[0095] In various embodiments, each of the first, second or third spacers is independently represented by Formula (Ia′), wherein:

[chemical structure]

and

[0096] n is 0, 1, 2 or 3.

[0097] In certain embodiments, each of the first, second or third spacers is independently represented by Formula II, wherein:

[chemical structure]

and

[0098] X is selected from —CH₂— and

[0099] In further embodiments, each of the first, second or third spacers is independently represented by Formula II′, wherein:

[chemical structure]

and

[0100] X is selected from —CH₂— and —O—.

[0101] In various embodiments, each of the first, second or third spacers is independently represented by Formula (IIa), wherein:

[chemical structure]

[0102] In further embodiments, each of the first, second or third spacers is independently represented by Formula (IIa′), wherein:

[chemical structure]

[0103] In various embodiments, each of the first, second or third spacers is independently represented by Formula III, wherein:

[chemical structure]

and

[0104] X is selected from —CH₂— and

[0105] In further embodiments, each of the first, second or third spacers is independently represented by Formula III′, wherein:

[chemical structure]

and

[0106] X is selected from —CH₂— and —O—.

[0107] In some embodiments, each of the first, second or third spacers is independently represented by Formula (IIIa), wherein:

[chemical structure]

[0108] In further embodiments, each of the first, second or third spacers is independently represented by Formula (IIIa′), wherein:

[chemical structure]

[0109] In various embodiments, the oligonucleotide comprising the spacer has a GC content of at least 10%. In various embodiments, the oligonucleotide comprising the spacer has a GC content of at least 20%. In various embodiments, the oligonucleotide comprising the spacer has a GC content of at least 25%. In various embodiments, the oligonucleotide comprising the spacer has a GC content of at least 30%. In various embodiments, the oligonucleotide comprising the spacer has a GC content of at least 40%. In various embodiments, the oligonucleotide comprising the spacer has a GC content of at least 50%.

### BRIEF DESCRIPTION OF THE DRAWINGS

[0110] FIG. 1 is a schematic depiction of portions of the STMN2 transcript and STMN2 antisense oligonucleotides that are designed to target certain portions of the STMN2 transcript.

[0111] FIG. 2 is a bar graph showing the results of RT-qPCR analysis of TDP43 and STMN2 full-length mRNA levels in the presence of TDP43 antisense, and restoration of the full-length STMN2 transcript in the presence of 6 different STMN2 parent oligonucleotides (SEQ ID NO: 36, SEQ ID NO: 55, SEQ ID NO: 177, SEQ ID NO: 203, SEQ ID NO: 244, and SEQ ID NO: 395).

[0112] FIG. 3 is a bar graph showing the results of RT-qPCR analysis of STMN2 transcript with cryptic exon mRNA levels in the presence of TDP43 antisense, and reduction of the STMN2 transcript with cryptic exon mRNA levels in the presence of 6 different STMN2 parent oligonucleotides (SEQ ID NO: 173, SEQ ID NO: 181, SEQ ID NO: 197, SEQ ID NO: 215, SEQ ID NO: 385, and SEQ ID NO: 400).

[0113] FIG. 4 is a bar graph showing the results of RT-qPCR analysis of STMN2 full-length mRNA levels in the presence of TDP43 antisense, and restoration of the full-length STMN2 transcript in the presence of 6 different STMN2 parent oligonucleotides (SEQ ID NO: 173, SEQ ID NO: 181, SEQ ID NO: 197, SEQ ID NO: 215, SEQ ID NO: 385, and SEQ ID NO: 400).

[0114] FIG. 5A is a bar graph showing the results of RT-qPCR analysis of STMN2 transcript with cryptic exon mRNA levels in the presence of TDP43 antisense, and reduction of the STMN2 transcript with cryptic exon mRNA levels in the presence of 6 different STMN2 parent oligonucleotides (SEQ ID NO: 185, SEQ ID NO: 209, SEQ ID NO: 237, SEQ ID NO: 252, SEQ ID NO: 380, and SEQ ID NO: 390).

[0115] FIG. 5B is a bar graph showing the results of RT-qPCR analysis of STMN2 full-length mRNA levels in the presence of TDP43 antisense, and restoration of the full-length STMN2 transcript in the presence of 6 different STMN2 parent oligonucleotides (SEQ ID NO: 185, SEQ ID NO: 209, SEQ ID NO: 237, SEQ ID NO: 252, SEQ ID NO: 380, and SEQ ID NO: 390).

[0116] FIG. 6A is a bar graph showing the results of RT-qPCR analysis of STMN2 transcript with cryptic exon mRNA levels in the presence of TDP43 antisense, and reduction of the STMN2 transcript with cryptic exon mRNA levels in the presence of 2 different STMN2 parent oligonucleotides (SEQ ID NO: 144 and SEQ ID NO: 237) over two duplicate experiments.

[0117] FIG. 6B is a bar graph showing the results of RT-qPCR analysis of STMN2 full-length mRNA levels in the presence of TDP43 antisense, and restoration of the full-length STMN2 transcript in the presence of 2 different STMN2 parent oligonucleotides (SEQ ID NO: 144 and SEQ ID NO: 237) over two duplicate experiments.

[0118] FIG. 7A is a bar graph showing the results of RT-qPCR analysis of STMN2 transcript with cryptic exon mRNA levels in the presence of TDP43 antisense, and reduction of the STMN2 transcript with cryptic exon mRNA levels in the presence of 5 different STMN2 parent oligonucleotides (SEQ ID NO: 36, SEQ ID NO: 173, SEQ ID NO: 177, SEQ ID NO: 181, and SEQ ID NO: 185).

[0119] FIG. 7B is a bar graph showing the results of RT-qPCR analysis of STMN2 full-length mRNA levels in the presence of TDP43 antisense, and restoration of the full-length STMN2 transcript in the presence of 5 different STMN2 parent oligonucleotides (SEQ ID NO: 36, SEQ ID NO: 173, SEQ ID NO: 177, SEQ ID NO: 181, and SEQ ID NO: 185).

[0120] FIG. 8A is a bar graph showing the results of RT-qPCR analysis of STMN2 transcript with cryptic exon mRNA levels in the presence of TDP43 antisense, and reduction of the STMN2 transcript with cryptic exon mRNA levels in the presence of 5 different STMN2 parent oligonucleotides (SEQ ID NO: 197, SEQ ID NO: 203, SEQ ID NO: 237, SEQ ID NO: 380, and SEQ ID NO: 395).

[0121] FIG. 8B is a bar graph showing the results of RT-qPCR analysis of STMN2 full-length mRNA levels in the presence of TDP43 antisense, and restoration of the full-length STMN2 transcript in the presence of 5 different STMN2 parent oligonucleotides (SEQ ID NO: 197, SEQ ID NO: 203, SEQ ID NO: 237, SEQ ID NO: 380, and SEQ ID NO: 395).

[0122] FIG. 9A is a bar graph showing the results of RT-qPCR analysis of STMN2 transcript with cryptic exon mRNA levels in the presence of TDP43 siRNA and TDP43 antisense, and reduction of the STMN2 transcript with cryptic exon mRNA levels in the presence of 3 different STMN2 parent oligonucleotides (SEQ ID NO: 144, SEQ ID NO: 173, and SEQ ID NO: 237).

[0123] FIG. 9B is a bar graph showing the results of RT-qPCR analysis of TDP43 and STMN2 full-length mRNA levels in the presence of TDP43 siRNA and TDP43 antisense, and restoration of the full-length STMN2 transcript in the presence of 3 different STMN2 parent oligonucleotides (SEQ ID NO: 144, SEQ ID NO: 173, and SEQ ID NO: 237).

[0124] FIG. 10A is a bar graph showing the results of RT-qPCR analysis of STMN2 transcript with cryptic exon mRNA levels in the presence of TDP43 siRNA and TDP43 antisense, and reduction of the STMN2 transcript with cryptic exon mRNA levels across different dosages of a SEQ ID NO: 181 STMN2 parent oligonucleotide.

[0125] FIG. 10B is a bar graph showing the results of RT-qPCR analysis of TDP43 and STMN2 full-length mRNA levels in the presence of TDP43 siRNA and TDP43 antisense, and restoration of the full-length STMN2 transcript across different dosages of a SEQ ID NO: 181 STMN2 parent oligonucleotide.

[0126] FIG. 11A is a bar graph showing the results of RT-qPCR analysis of STMN2 transcript with cryptic exon mRNA levels in the presence of TDP43 siRNA and TDP43 antisense, and reduction of the STMN2 transcript with cryptic exon mRNA levels across different dosages of a SEQ ID NO: 185 STMN2 parent oligonucleotide.

[0127] FIG. 11B is a bar graph showing the results of RT-qPCR analysis of TDP43 and STMN2 full-length mRNA levels in the presence of TDP43 siRNA and TDP43 antisense, and restoration of the full-length STMN2 transcript across different dosages of a SEQ ID NO: 185 STMN2 parent oligonucleotide.

[0128] FIG. 12A is a bar graph showing the results of RT-qPCR analysis of STMN2 transcript with cryptic exon mRNA levels in the presence of TDP43 siRNA and TDP43 antisense, and reduction of the STMN2 transcript with cryptic exon mRNA levels across different dosages of a SEQ ID NO: 197 STMN2 parent oligonucleotide.

[0129] FIG. 12B is a bar graph showing the results of RT-qPCR analysis of TDP43 and STMN2 full-length mRNA levels in the presence of TDP43 siRNA and TDP43 antisense, and restoration of the full-length STMN2 transcript across different dosages of a SEQ ID NO: 197 STMN2 parent oligonucleotide.

[0130] FIG. 13A is a bar graph showing the results of RT-qPCR analysis of STMN2 transcript with cryptic exon mRNA levels in the presence of TDP43 siRNA and TDP43 antisense, and reduction of the STMN2 transcript with cryptic exon mRNA levels across different dosages of a SEQ ID NO: 144 STMN2 parent oligonucleotide.

[0131] FIG. 13B is a bar graph showing the results of RT-qPCR analysis of TDP43 and STMN2 full-length mRNA levels in the presence of TDP43 siRNA and TDP43 antisense, and restoration of the full-length STMN2 transcript across different dosages of a SEQ ID NO: 144 STMN2 parent oligonucleotide.

[0132] FIG. 14A is a bar graph showing the results of RT-qPCR analysis of STMN2 transcript with cryptic exon mRNA levels in the presence of TDP43 siRNA and TDP43 antisense, and reduction of the STMN2 transcript with cryptic exon mRNA levels across different dosages of a SEQ ID NO: 173 STMN2 parent oligonucleotide.

[0133] FIG. 14B is a bar graph showing the results of RT-qPCR analysis of TDP43 and STMN2 full-length mRNA levels in the presence of TDP43 siRNA and TDP43 antisense, and restoration of the full-length STMN2 transcript across different dosages of a SEQ ID NO: 173 STMN2 parent oligonucleotide.

[0134] FIG. 15A is a bar graph showing the results of RT-qPCR analysis of STMN2 transcript with cryptic exon mRNA levels in the presence of TDP43 siRNA and TDP43 antisense, and reduction of the STMN2 transcript with cryptic exon mRNA levels across different dosages of a SEQ ID NO: 237 STMN2 parent oligonucleotide.

[0135] FIG. 15B is a bar graph showing the results of RT-qPCR analysis of TDP43 and STMN2 full-length mRNA levels in the presence of TDP43 siRNA and TDP43 antisense, and restoration of the full-length STMN2 transcript across different dosages of a SEQ ID NO: 237 STMN2 parent oligonucleotide.

[0136] FIG. 16 is a protein blot and quantified bar graph showing the normalized quantity of STMN2 full-length mRNA levels in the presence of TDP43 siRNA and TDP43 antisense, and restoration of the full-length STMN2 transcript for 2 different STMN2 parent oligonucleotides (SEQ ID NO: 173 and SEQ ID NO: 237).

[0137] FIG. 17A is a bar graph showing the results of RT-qPCR analysis of STMN2 transcript with cryptic exon mRNA levels in the presence of TDP43 siRNA and TDP43 antisense, and reduction of the STMN2 transcript with cryptic exon mRNA levels using different variants of a SEQ ID NO: 237 STMN2 parent oligonucleotide.

[0138] FIG. 17B is a bar graph showing the results of RT-qPCR analysis of TDP43 and STMN2 full-length mRNA levels in the presence of TDP43 siRNA and TDP43 antisense, and restoration of the full-length STMN2 transcript using different variants of a SEQ ID NO: 237 STMN2 parent oligonucleotide.

[0139] FIG. 18A is a bar graph showing the results of RT-qPCR analysis of STMN2 transcript with cryptic exon mRNA levels in the presence of TDP43 siRNA and TDP43 antisense, and reduction of the STMN2 transcript with cryptic exon mRNA levels using different variants of a SEQ ID NO: 185 STMN2 parent oligonucleotide.

[0140] FIG. 18B is a bar graph showing the results of RT-qPCR analysis of TDP43 and STMN2 full-length mRNA levels in the presence of TDP43 siRNA and TDP43 antisense, and restoration of the full-length STMN2 transcript using different variants of a SEQ ID NO: 185 STMN2 parent oligonucleotide.

[0141] FIG. 19A is a bar graph showing the results of RT-qPCR analysis of STMN2 transcript with cryptic exon mRNA levels in the presence of TDP43 siRNA and TDP43 antisense, and reduction of the STMN2 transcript with cryptic exon mRNA levels using different variants of a SEQ ID NO: 173 STMN2 parent oligonucleotide.

[0142] FIG. 19B is a bar graph showing the results of RT-qPCR analysis of TDP43 and STMN2 full-length mRNA levels in the presence of TDP43 siRNA and TDP43 antisense, and restoration of the full-length STMN2 transcript using different variants of a SEQ ID NO: 173 STMN2 parent oligonucleotide.

[0143] FIG. 20A is a bar graph showing the results of RT-qPCR analysis of STMN2 transcript with cryptic exon mRNA levels in the presence of TDP43 siRNA and TDP43 antisense, and reduction of the STMN2 transcript with cryptic exon mRNA levels using different variants of a SEQ ID NO: 237 STMN2 parent oligonucleotide.

[0144] FIG. 20B is a bar graph showing the results of RT-qPCR analysis of TDP43 and STMN2 full-length mRNA levels in the presence of TDP43 siRNA and TDP43 antisense, and restoration of the full-length STMN2 transcript using different variants of a SEQ ID NO: 237 STMN2 parent oligonucleotide.

[0145] FIG. 21A is a bar graph showing the results of RT-qPCR analysis of STMN2 transcript with cryptic exon mRNA levels in the presence of TDP43 siRNA and TDP43 antisense, and reduction of the STMN2 transcript with cryptic exon mRNA levels using different variants of a SEQ ID NO: 173 STMN2 parent oligonucleotide.

[0146] FIG. 21B is a bar graph showing the results of RT-qPCR analysis of TDP43 and STMN2 full-length mRNA levels in the presence of TDP43 siRNA and TDP43 antisense, and restoration of the full-length STMN2 transcript using different variants of a SEQ ID NO: 173 STMN2 parent oligonucleotide.

[0147] FIG. 22A is a bar graph showing the results of RT-qPCR analysis of STMN2 transcript with cryptic exon mRNA levels in the presence of TDP43 siRNA and TDP43 antisense, and reduction of the STMN2 transcript with cryptic exon mRNA levels using different variants of a SEQ ID NO: 144 STMN2 parent oligonucleotide.

[0148] FIG. 22B is a bar graph showing the results of RT-qPCR analysis of TDP43 and STMN2 full-length mRNA levels in the presence of TDP43 siRNA and TDP43 antisense, and restoration of the full-length STMN2 transcript using different variants of a SEQ ID NO: 144 STMN2 parent oligonucleotide.

[0149] FIG. 23 is a bar graph showing reversal of cryptic exon induction using SEQ ID NO: 237 STMN2 parent oligonucleotide even in view of increasing proteasome inhibition.

[0150] FIG. 24 shows the dose response curve illustrating increasing restoration of full length STMN2 transcript with increasing concentrations of STMN2 AON.

[0151] FIG. 25A shows a protein blot assay demonstrating the qualitative increase of full length STMN2 protein in response to higher concentrations of STMN2 AON.

[0152] FIG. 25B shows the quantitated levels of full length STMN2 protein normalized to GAPDH in response to different concentrations of STMN2 AON.

[0153] FIG. 26A is a bar graph showing the results of RT-qPCR analysis of STMN2 transcript with cryptic exon mRNA levels in the presence of TDP43 siRNA and TDP43 antisense, and reduction of the STMN2 transcript with cryptic exon mRNA levels across different dosages of STMN2 AONs including a SEQ ID NO: 144 AON, a SEQ ID NO: 144 AON with two spacers (SEQ ID NO: 1589), a SEQ ID NO: 173 AON, a SEQ ID NO: 173 with two spacers (SEQ ID NO: 1590), a SEQ ID NO: 237 AON, and a SEQ ID NO: 237 AON with two spacers (SEQ ID NO: 1591).

[0154] FIG. 26B is a bar graph showing the results of RT-qPCR analysis of TDP43 and STMN2 full-length mRNA levels in the presence of TDP43 siRNA and TDP43 antisense, and restoration of the full-length STMN2 transcript across different dosages of STMN2 AONs including a SEQ ID NO: 144 AON, a SEQ ID NO: 144 AON with two spacers (SEQ ID NO: 1589), a SEQ ID NO: 173 AON, a SEQ ID NO: 173 with two spacers (SEQ ID NO: 1590), a SEQ ID NO: 237 AON, and a SEQ ID NO: 237 AON with two spacers (SEQ ID NO: 1591).

[0155] FIG. 27A is a bar graph showing the results of RT-qPCR analysis of STMN2 transcript with cryptic exon mRNA levels in the presence of TDP43 antisense, and reduction of the STMN2 transcript with cryptic exon mRNA levels across different dosages of STMN2 AONs including SEQ ID NO: 173, SEQ ID NO: 1608, SEQ ID NO: 1609, SEQ ID NO: 1610, SEQ ID NO: 1611, SEQ ID NO: 1612, SEQ ID NO: 1613, SEQ ID NO: 1614, SEQ ID NO: 1615, SEQ ID NO: 1596, SEQ ID NO: 1597, and SEQ ID NO: 1418.

[0156] FIG. 27B is a bar graph showing the results of RT-qPCR analysis of TDP43 and STMN2 full-length mRNA levels in the presence of TDP43 antisense, and restoration of the full-length STMN2 transcript across different dosages of STMN2 AONs including SEQ ID NO: 173, SEQ ID NO: 1608, SEQ ID NO: 1609, SEQ ID NO: 1610, SEQ ID NO: 1611, SEQ ID NO: 1612, SEQ ID NO: 1613, SEQ ID NO: 1614, SEQ ID NO: 1615, SEQ ID NO: 1596, SEQ ID NO: 1597, and SEQ ID NO: 1418.

[0157] FIG. 28A is a bar graph showing the results of RT-qPCR analysis of STMN2 transcript with cryptic exon mRNA levels in the presence of TDP43 antisense, and reduction of the STMN2 transcript with cryptic exon mRNA levels across different dosages of STMN2 AONs including SEQ ID NO: 173, SEQ ID NO: 1632, SEQ ID NO: 1346, SEQ ID NO: 1631, SEQ ID NO: 1353, and SEQ ID NO: 1598.

[0158] FIG. 28B is a bar graph showing the results of RT-qPCR analysis of TDP43 and STMN2 full-length mRNA levels in the presence of TDP43 antisense, and restoration of the full-length STMN2 transcript across different dosages of STMN2 AONs including SEQ ID NO: 173, SEQ ID NO: 1632, SEQ ID NO: 1346, SEQ ID NO: 1631, SEQ ID NO: 1353, and SEQ ID NO: 1598.

[0159] FIG. 29A is a bar graph showing the results of RT-qPCR analysis of STMN2 transcript with cryptic exon mRNA levels in the presence of TDP43 antisense, and reduction of the STMN2 transcript with cryptic exon mRNA levels across different dosages of STMN2 AONs including SEQ ID NO: 173 and SEQ ID NO: 1610.

[0160] FIG. 29B is a bar graph showing the results of RT-qPCR analysis of TDP43 and STMN2 full-length mRNA levels in the presence of TDP43 antisense, and restoration of the full-length STMN2 transcript across different dosages of STMN2 AONs including SEQ ID NO: 173 and SEQ ID NO: 1610.

[0161] FIG. 30A is a bar graph showing the results of RT-qPCR analysis of STMN2 transcript with cryptic exon mRNA levels in the presence of TDP43 antisense, and reduction of the STMN2 transcript with cryptic exon mRNA levels across different dosages of STMN2 AONs including SEQ ID NO: 185 and SEQ ID NO: 1635.

[0162] FIG. 30B is a bar graph showing the results of RT-qPCR analysis of TDP43 and STMN2 full-length mRNA levels in the presence of TDP43 antisense, and restoration of the full-length STMN2 transcript across different dosages of STMN2 AONs including SEQ ID NO: 185 and SEQ ID NO: 1635.

[0163] FIG. 31A is a bar graph showing the results of RT-qPCR analysis of STMN2 transcript with cryptic exon mRNA levels in the presence of TDP43 antisense, and reduction of the STMN2 transcript with cryptic exon mRNA levels across different dosages of STMN2 AONs including SEQ ID NO: 1347, SEQ ID NO: 1633, and SEQ ID NO: 1634.

[0164] FIG. 31B is a bar graph showing the results of RT-qPCR analysis of TDP43 and STMN2 full-length mRNA levels in the presence of TDP43 antisense, and restoration of the full-length STMN2 transcript across different dosages of STMN2 AONs including SEQ ID NO: 1347, SEQ ID NO: 1633, and SEQ ID NO: 1634.

[0165] FIG. 32A is a bar graph showing the results of RT-qPCR analysis of STMN2 transcript with cryptic exon mRNA levels in the presence of TDP43 antisense, and reduction of the STMN2 transcript with cryptic exon mRNA levels across different dosages of STMN2 AONs including SEQ ID NO: 197, SEQ ID NO: 1617, SEQ ID NO: 1618, and SEQ ID NO: 1619.

[0166] FIG. 32B is a bar graph showing the results of RT-qPCR analysis of TDP43 and STMN2 full-length mRNA levels in the presence of TDP43 antisense, and restoration of the full-length STMN2 transcript across different dosages of STMN2 AONs including SEQ ID NO: 197, SEQ ID NO: 1617, SEQ ID NO: 1618, and SEQ ID NO: 1619.

[0167] FIG. 33A is a bar graph showing the results of RT-qPCR analysis of STMN2 transcript with cryptic exon mRNA levels in the presence of TDP43 antisense, and reduction of the STMN2 transcript with cryptic exon mRNA levels across different dosages of STMN2 AONs including SEQ ID NO: 252, SEQ ID NO: 1650, SEQ ID NO: 1434, SEQ ID NO: 1651, and SEQ ID NO: 1620.

[0168] FIG. 33B is a bar graph showing the results of RT-qPCR analysis of TDP43 and STMN2 full-length mRNA levels in the presence of TDP43 antisense, and restoration of the full-length STMN2 transcript across different dosages of STMN2 AONs including SEQ ID NO: 252, SEQ ID NO: 1650, SEQ ID NO: 1434, SEQ ID NO: 1651, and SEQ ID NO: 1620.

[0169] FIG. 34A is a bar graph showing the results of RT-qPCR analysis of STMN2 transcript with cryptic exon mRNA levels in the presence of TDP43 antisense, and reduction of the STMN2 transcript with cryptic exon mRNA levels across different dosages of STMN2 AONs including SEQ ID NO: 1434 and SEQ ID NO: 1620.

[0170] FIG. 34B is a bar graph showing the results of RT-qPCR analysis of TDP43 and STMN2 full-length mRNA levels in the presence of TDP43 antisense, and restoration of the full-length STMN2 transcript across different dosages of STMN2 AONs including SEQ ID NO: 1434 and SEQ ID NO: 1620.

[0171] FIG. 35 is a bar graph showing normalized STMN2 protein levels following treatment with TDP43 antisense and restoration using STMN2 AONs including SEQ ID NO: 144, SEQ ID NO: 1589, SEQ ID NO: 173, SEQ ID NO: 1616, SEQ ID NO: 237, and SEQ ID NO: 1591.

### DETAILED DESCRIPTION

[0172] The features and other details of the disclosure will now be more particularly described. Certain terms employed in the specification, examples and appended claims are collected here. These definitions should be read in light of the remainder of the disclosure and understood as by a person of skill in the art. Unless defined otherwise, all technical and scientific terms used herein have the same meaning as commonly understood by a person of ordinary skill in the art.

[0173] Disclosed herein are oligonucleotides capable of targeting a region of a transcript transcribed from a gene. In various embodiments, such oligonucleotides target a STMN2 transcript. Additionally disclosed herein are oligonucleotides, including antisense oligonucleotide sequences, and methods for treating neurological diseases, such as amyotrophic lateral sclerosis and frontotemporal dementia, and/or neuropathies such as chemotherapy induced neuropathy, using same. In one embodiment, the oligonucleotides target a cryptic exon sequence of STMN2 transcripts, thereby reducing levels of STMN2 transcripts with the cryptic exon sequence. Also disclosed are pharmaceutical compositions comprising STMN2 oligonucleotides that target a region of STMN2 transcripts that comprise a cryptic exon, for treating neurological diseases and/or neuropathies; and manufacture of medicaments containing a disclosed STMN2 oligonucleotide that targets a region of STMN2 transcripts that comprise a cryptic exon to be used in treating a neurological disease and/or neuropathy.

### Definitions

[0174] The terms “treat,” “treatment,” “treating,” and the like are used herein to generally mean obtaining a desired pharmacological and/or physiological effect. The effect may be therapeutic in terms of partially or completely curing a disease and/or adverse effect attributed to the disease. The term “treatment” as used herein covers any treatment of a disease in a mammal, particularly a human, and includes: (a) inhibiting the disease, i.e., preventing the disease from increasing in severity or scope; (b) relieving the disease, i.e., causing partial or complete amelioration of the disease; or (c) preventing relapse of the disease, i.e., preventing the disease from returning to an active state following previous successful treatment of symptoms of the disease or treatment of the disease.

[0175] “Preventing” includes delaying the onset of clinical symptoms, complications, or biochemical indicia of the state, disorder, disease, or condition developing in a subject that may be afflicted with or predisposed to the state, disorder, disease, or condition but does not yet experience or display clinical or subclinical symptoms of the state, disorder, disease, or condition. “Preventing” includes prophylactically treating a state, disorder, disease, or condition in or developing in a subject, including prophylactically treating clinical symptoms, complications, or biochemical indicia of the state, disorder, disease, or condition in or developing in a subject.

[0176] The term “pharmaceutically acceptable carrier” or “pharmaceutically acceptable excipient” as used herein interchangeably refers to any and all solvents, dispersion media, coatings, isotonic and absorption delaying agents, and the like, that are compatible with pharmaceutical administration. The use of such media and agents for pharmaceutically active substances is well known in the art. The compositions may also contain other active compounds providing supplemental, additional, or enhanced therapeutic functions.

[0177] The term “pharmaceutical composition” as used herein refers to a composition comprising at least one biologically active compound, for example, a STMN2 antisense oligonucleotide (AON), as disclosed herein formulated together with one or more pharmaceutically acceptable excipients.

[0178] “Individual,” “patient,” or “subject” are used interchangeably and include any animal, including mammals, preferably mice, rats, other rodents, rabbits, dogs, cats, swine, cattle, sheep, horses, or non-human primates, and most preferably humans. The compounds of the invention can be administered to a mammal, such as a human, but can also be other mammals such as an animal in need of veterinary treatment, e.g., domestic animals (e.g., dogs, cats, and the like), farm animals (e.g., cows, sheep, pigs, horses, and the like) and laboratory animals (e.g., rats, mice, guinea pigs, non-human primates, and the like). In some embodiments, the mammal treated in the methods of the invention is desirably a mammal in whom modulation of STMN2 expression and/or activity is desired.

[0179] As used herein, “STMN2” (also known as Superior Cervical Ganglion-10 Protein, Stathmin-Like 2, SCGN10, SCG10, Neuronal Growth-Associated Protein, Neuron-Specific Growth-Associated Protein, or Protein SCG10 (Superior Cervical Ganglia NEAR Neural Specific 10) refers to the gene or gene products (e.g., protein or mRNA transcript (including pre-mRNA) encoded by the gene) identified by Entrez Gene ID No. 11075 and allelic variants thereof, as well as orthologs found in non-human species (e.g., non-human primates or mice).

[0180] The term “STMN2 transcript” refers to a STMN2 transcript comprising a cryptic exon. Such a STMN2 transcript comprising a cryptic exon can be a STMN2 pre-mRNA sequence or a STMN2 mature RNA sequence. The term “STMN2 transcript comprising a cryptic exon” refers to a STMN2 transcript that includes one or more cryptic exon sequences.

[0181] The term “STMN2 oligonucleotide,” “STMN2 antisense oligonucleotide,” or “STMN2 AON” refers to an oligonucleotide that is capable of increasing, restoring, or stabilizing full-length STMN2 activity e.g., full length STMN2 expression, for example, full length STMN2 mRNA and/or full length STMN2 protein expression. Generally, a STMN2 oligonucleotide reduces the level of mature STMN2 transcripts with a cryptic exon by targeting a STMN2 transcript comprising a cryptic exon. For example, the STMN2 oligonucleotide reduces the level of mature STMN2 transcripts with a cryptic exon by repressing premature polyadenylation of STMN2 pre-mRNA and/or increasing, restoring, or stabilizing activity or function of STMN2. In various embodiments, a STMN2 oligonucleotide comprises a sequence that is between 85 and 98% complementary to an equal length portion of a transcript comprising a sequence at least 90% identity to SEQ ID NO: 1339 or SEQ ID NO: 1341, or a contiguous 15 to 50 nucleobase portion of SEQ ID NO: 1339 or SEQ ID NO: 1341.

[0182] In various embodiments, STMN2 oligonucleotides are characterized by having one or more spacers, where each spacer divides up the STMN2 oligonucleotide into segments of linked nucleosides. In various embodiments, STMN2 oligonucleotides have two spacers. In one embodiment, STMN2 oligonucleotides have two segments of linked nucleosides separated by one spacer. In one embodiment, STMN2 oligonucleotides have three segments of linked nucleosides separated by two spacers. In such embodiments, STMN2 oligonucleotides have one segment with at most 7 linked nucleosides. For example, a STMN2 oligonucleotide may have, from the 5′ to the 3′ end, 5 linked nucleosides, followed by a spacer, 10 linked nucleosides, followed by a second spacer, and 8 linked nucleosides. Thus, the first segment of 5 linked nucleosides satisfies the one segment with at most 7 linked nucleosides. In various embodiments, STMN2 oligonucleotides have three spacers that divide the STMN2 oligonucleotide into four segments. In various embodiments, each of the four segments of the STMN2 oligonucleotide have at most 7 linked nucleosides.

[0183] As used herein, the term “STMN2 oligonucleotide” encompasses a “STMN2 parent oligonucleotide,” a “STMN2 oligonucleotide with one or more spacers” (e.g., STMN2 oligonucleotide with two spacers or a STMN2 oligonucleotide with three spacers), a “STMN2 oligonucleotide variant with one or more spacers.” Examples of STMN2 oligonucleotides include oligonucleotides comprising a sequence of any one of SEQ ID NOs: 1-466, SEQ ID NO: 893-1338, SEQ ID NOs: 1342-1366, and SEQ ID NOs: 1392-1664.

[0184] The term “STMN2 parent oligonucleotide” refers to an oligonucleotide that targets a STMN2 transcript with a cryptic exon and is capable of increasing, restoring, or stabilizing full-length STMN2 activity e.g., full length STMN2 expression, for example, full length STMN2 mRNA and/or full length STMN2 protein expression. STMN2 parent oligonucleotides do not include a spacer. Examples of STMN2 parent oligonucleotides include oligonucleotides comprising a sequence of any one of SEQ ID NOs: 1-446 and SEQ ID NOs: 893-1338. As described hereafter, STMN2 oligonucleotide with spacers and STMN2 oligonucleotide variants are described in relation to a corresponding STMN2 parent oligonucleotide.

[0185] The term “STMN2 oligonucleotide variant” refers to a STMN2 oligonucleotide that represents a modified version of a corresponding STMN2 parent oligonucleotide. For example, a STMN2 oligonucleotide variant represents a shortened version of a STMN2 parent oligonucleotide. In various embodiments, a STMN2 oligonucleotide variant is any one of a 15mer, 16mer, 17mer, 18mer 19mer, 20mer, 21mer, 22mer or 23mer. Examples of STMN2 oligonucleotide variants include oligonucleotides comprising a sequence of any one of SEQ ID NOs: 1342-1366 or SEQ ID NOs: 1392-1521. In various embodiments, STMN2 oligonucleotide variants comprise one or more spacers. Such STMN2 oligonucleotide variants comprise a sequence of any one of SEQ ID NOs: 1342-1366 and SEQ ID NOs: 1392-1416.

[0186] The term “oligonucleotide with one or more spacers” or “oligonucleotide comprising a spacer” refers to an oligonucleotide with at least one spacer. An oligonucleotide with one or more spacers can, in various embodiments, include one spacer, two spacers, three spacers, four spacer, five spacers, six spacers, seven spacers, eight spacers, nine spacers, or ten spacers. In various embodiments, an oligonucleotide comprising one or more spacers includes at least one segment with at most 7 linked nucleosides. For example, as described in a 5′ to 3′ direction, an oligonucleotide comprising a spacer can include a segment with 7 linked nucleosides, followed by a spacer, a second segment with 9 linked nucleosides, followed by a second spacer, and a third segment with 7 linked nucleosides. Here, the first segment of 7 linked nucleosides and the third segment of 7 linked nucleosides each represents segments with at most 7 linked nucleosides. As another example, an oligonucleotide comprising a spacer can include a segment with 10 linked nucleosides, followed by a spacer, a second segment with 10 linked nucleosides, followed by a second spacer, and a third segment with 3 linked nucleosides. Here, the third segment of 3 linked nucleosides represents the segment with at most 7 linked nucleosides. In various embodiments, an oligonucleotide with one or more spacers includes multiple segments with at most 7 linked nucleosides. In various embodiments, every segment of an oligonucleotide with one or more spacers has at most 7 linked nucleosides. For example, the oligonucleotide may be a 23mer and include two spacers that divide the 23mer into three separate segments of 7 linked nucleosides each. Therefore, each segment of the oligonucleotide has at most 7 linked nucleosides.

[0187] Generally, STMN2 oligonucleotides comprising one or more spacers are described in reference to a corresponding STMN2 parent oligonucleotide or a corresponding STMN2 oligonucleotide variant. Example STMN2 oligonucleotides comprising one or spacers include any of SEQ ID NOs: 1417-1420 and SEQ ID NOs: 1451-1664.

[0188] In the present specification, the term “therapeutically effective amount” means the amount of an oligonucleotide that will elicit the biological or medical response of a tissue, system, animal or human that is being sought by the researcher, veterinarian, medical doctor, or other clinician. In one embodiment, the oligonucleotide comprises a sequence that is between 85 and 98% complementary to an equal length portion of a transcript comprising a sequence at least 90% identity to SEQ ID NO: 1339 or SEQ ID NO: 1341, or a contiguous 15 to 50 nucleobase portion of SEQ ID NO: 1339 or SEQ ID NO: 1341. The oligonucleotide is administered in therapeutically effective amounts to treat and/or prevent a disease, condition, disorder, or state, for example, a neurological disease and/or a neuropathy. Alternatively, a therapeutically effective amount of an oligonucleotide is the quantity required to achieve a desired therapeutic and/or prophylactic effect, such as an amount which results in the prevention of or a decrease in the symptoms associated with a disease associated with reduced STMN2 activity in the motor neurons.

[0189] The phrase “a STMN2 oligonucleotide that targets a STMN2 transcript” refers to a STMN2 oligonucleotide that binds to a STMN2 transcript. Example regions of a STMN2 transcript are shown in Table 1, which depicts sequences corresponding to regions of branch points (e.g., branch point 1, 2, and 3) a 3′ splice acceptor region, an ESE binding region, TDP43 binding sites, a cryptic exon, and a Poly A region. In various embodiments, the oligonucleotide binds to a region of a STMN2 transcript with a cryptic exon, the region being located less than 75 nucleobases upstream or downstream to any of the branch points (e.g., branch point 1, 2, and 3) a 3′ splice acceptor region, an ESE binding region, TDP43 binding sites, a cryptic exon, and a Poly A region.

[0190] The term “pharmaceutically acceptable salt(s)” as used herein refers to salts of acidic or basic groups that may be present in a STMN2 oligonucleotide used in the present compositions. A STMN2 oligonucleotide included in the present compositions that are basic in nature are capable of forming a wide variety of salts with various inorganic and organic acids. The acids that may be used to prepare pharmaceutically acceptable acid addition salts of such basic compounds are those that form non-toxic acid addition salts, i.e., salts containing pharmacologically acceptable anions, including but not limited to malate, oxalate, chloride, bromide, iodide, nitrate, sulfate, bisulfate, phosphate, acid phosphate, isonicotinate, acetate, lactate, salicylate, citrate, tartrate, oleate, tannate, pantothenate, bitartrate, ascorbate, succinate, maleate, gentisinate, fumarate, gluconate, glucuronate, saccharate, formate, benzoate, glutamate, methanesulfonate, ethanesulfonate, benzenesulfonate, p-toluenesulfonate and pamoate (i.e., 1,1′-methylene-bis-(2-hydroxy-3-naphthoate)) salts. A STMN2 oligonucleotide included in the present compositions that include an amino moiety may form pharmaceutically acceptable salts with various amino acids, in addition to the acids mentioned above. Compounds included in the present compositions that are acidic in nature are capable of forming base salts with various pharmacologically acceptable cations. Examples of such salts include alkali metal or alkaline earth metal salts and, particularly, calcium, magnesium, sodium, and lithium salts. Pharmaceutically acceptable salts of the disclosure include, for example, pharmaceutically acceptable salts of STMN2 oligonucleotides that include a sequence of any of SEQ ID NOs: 1-466, SEQ ID NO: 893-1338, SEQ ID NOs: 1342-1366, and SEQ ID NOs: 1392-1664.

[0191] A STMN2 oligonucleotide of the disclosure may contain one or more chiral centers, groups, linkages, and/or double bonds and, therefore, exist as stereoisomers, such as geometric isomers, enantiomers or diastereomers. The term “stereoisomers” when used herein consist of all geometric isomers, enantiomers or diastereomers. These compounds may be designated by the symbols “R” or “S” (or “Rp” or “Sp”) depending on the configuration of substituents around the stereogenic atom, for example, a stereogenic carbon, phosphorous, or sulfur atom. In some embodiments, one or more linkages of the compound may have a Rp or Sp configuration (e.g., one or more phosphorothioate linkages have either a Rp or Sp configuration). The configuration of each phosphorothioate linkage may be independent of another phosphorothioate linkage (e.g., one phosphorothioate linkage has a Rp configuration and a second phosphorothioate linkage has a Sp configuration). In various embodiments, the STMN2 oligonucleotide can have a mixed configuration of phosphorothioate linkages. For example, the STMN2 oligonucleotide may have five phosphorothioate linkages in a Rp configuration, followed by fifteen phosphorothioate linkages in a Sp configuration, followed by five phosphorothioate linkages in a Rp configuration. The present invention encompasses various stereoisomers of these compounds and mixtures thereof. Stereoisomers include enantiomers and diastereomers. Mixtures of enantiomers or diastereomers may be designated “(±)” in nomenclature, but the skilled artisan will recognize that a structure may denote a chiral center implicitly.

[0192] Individual stereoisomers of a STMN2 oligonucleotide of the present invention can be prepared synthetically from commercially available starting materials that contain asymmetric or stereogenic centers, or by preparation of racemic mixtures followed by resolution methods well known to those of ordinary skill in the art. These methods of resolution are exemplified by (1) attachment of a mixture of enantiomers to a chiral auxiliary, separation of the resulting mixture of diastereomers by recrystallization or chromatography and liberation of the optically pure product from the auxiliary, (2) salt formation employing an optically active resolving agent, or (3) direct separation of the mixture of optical enantiomers on chiral chromatographic columns. Stereoisomeric mixtures can also be resolved into their component stereoisomers by well-known methods, such as chiral-phase gas chromatography, chiral-phase super critical fluid chromatography, chiral-phase simulated moving bed chromatography, chiral-phase high performance liquid chromatography, crystallizing the compound as a chiral salt complex, or crystallizing the compound in a chiral solvent. Stereoisomers can also be obtained from stereomerically-pure intermediates, reagents, and catalysts by well-known asymmetric synthetic methods.

[0193] The STMN2 oligonucleotide disclosed herein can exist in solvated as well as unsolvated forms with pharmaceutically acceptable solvents such as water, ethanol, and the like, and it is intended that the invention embrace both solvated and unsolvated forms.

[0194] The disclosure also embraces isotopically labeled compounds of the invention (i.e., isotopically labeled STMN2 oligonucleotide) which are identical to those recited herein, except that one or more atoms are replaced by an atom having an atomic mass or mass number different from the atomic mass or mass number abundantly found in nature. Examples of isotopes that can be incorporated into compounds of the invention include isotopes of hydrogen, carbon, nitrogen, oxygen, phosphorus, fluorine and chlorine, such as ²H, ³H, ¹¹C, ¹³C, ¹⁴C, ¹⁵N, ¹⁸O, ¹⁷O, ³¹P, ³²P, ³³P, ³⁵S, ¹⁸F, and ³⁶Cl, respectively.

[0195] Certain isotopically labeled disclosed compounds (e.g., those labeled with ³H, ¹⁴ or ³⁵S) are useful in compound and/or substrate tissue distribution assays. Tritiated (i.e., ³H), carbon-14 (i.e., ¹⁴C), or ³⁵S methionine isotopes are particularly preferred for their ease of preparation and detectability. Further, substitution with heavier isotopes such as deuterium (i.e., ²H) may afford certain therapeutic advantages resulting from greater metabolic stability (e.g., increased in vivo half-life or reduced dosage requirements) and hence may be preferred in some circumstances.

[0196] As used herein, “2′-O-(2-methoxyethyl)” (also 2′-MOE and 2′-O(CH₂)₂OCH₃ and MOE) refers to an O-methoxyethyl modification of the 2′ position of a furanose ring. A 2′-O-(2-methoxyethyl) is used interchangeably as “2′-O-methoxyethyl” in the present disclosure. A sugar moiety in a nucleoside modified with 2′-MOE is a modified sugar.

[0197] As used herein, “2′-MOE nucleoside” (also 2′-O-(2-methoxyethyl) nucleoside) means a nucleoside comprising a 2′-MOE modified sugar moiety.

[0198] As used herein, “2′-substituted nucleoside” means a nucleoside comprising a substituent at the 2′-position of the furanose ring other than H or OH. In certain embodiments, 2′ substituted nucleosides include nucleosides with bicyclic sugar modifications.

[0199] As used herein, “5-methyl cytosine” (5-MeC) means a cytosine modified with a methyl group attached to the 5 position. A 5-methyl cytosine (5-MeC) is a modified nucleobase.

[0200] As used herein, “bicyclic sugar” means a furanose ring modified by the bridging of two atoms. A bicyclic sugar is a modified sugar.

[0201] As used herein, “bicyclic nucleoside” (also BNA) means a nucleoside having a sugar moiety comprising a bridge connecting two carbon atoms of the sugar ring, thereby forming a bicyclic ring system. In certain embodiments, the bridge connects the 4′-carbon and the 2′-carbon of the sugar ring.

[0202] As used herein, “cap structure” or “terminal cap moiety” means chemical modifications, which have been incorporated at either terminus of an antisense compound.

[0203] As used herein, “cEt” or “constrained ethyl” means a bicyclic nucleoside having a sugar moiety comprising a bridge connecting the 4′-carbon and the 2′-carbon, wherein the bridge has the formula: 4′-CH(CH₃)—O-2′.

[0204] As used herein, “constrained ethyl nucleoside” (also cEt nucleoside) means a nucleoside comprising a bicyclic sugar moiety comprising a 4′-CH(CH₃)—O-2′ bridge. In some embodiments, cEt can be modified. In some embodiments, the cEt can be S-cEt (in an S-constrained ethyl 2′-4′-bridged nucleic acid). In some other embodiments, the cEt can be R-cEt.

[0205] As used herein, “internucleoside linkage” refers to the covalent linkage between adjacent nucleosides in an oligonucleotide. In some embodiments, as used herein, “non-natural linkage” refers to a “modified internucleoside linkage.”

[0206] As used herein, “contiguous” in the context of an oligonucleotide refers to nucleosides, nucleobases, sugar moieties, or internucleoside linkages that are immediately adjacent to each other. For example, “contiguous nucleobases” means nucleobases that are immediately adjacent to each other in a sequence. As an example to the contrary, two nucleosides separated by a spacer are not contiguous.

[0207] As used herein, “locked nucleic acid” or “LNA” or “LNA nucleosides” means nucleic acid monomers having a bridge (e.g., methylene, ethylene, aminooxy, or oxyimino bridge) connecting two carbon atoms between the 4′ and 2′ position of the nucleoside sugar unit, thereby forming a bicyclic sugar. Examples of such bicyclic sugar include, but are not limited to (A) α-L-Methyleneoxy (4′-CH₂—O-2′) LNA, (B) β-D-Methyleneoxy (4′-CH₂—O-2′) LNA, (C) Ethyleneoxy (4′-(CH₂)₂—O-2′) LNA, (D) Aminooxy (4′-CH₂—O—N®-2′) LNA and ® Oxyamino (4′-CH₂—N®—O-2′) LNA; wherein R is H, C₁-C₁₂ alkyl, or a protecting group (see U.S. Pat. No. 7,427,672, issued on Sep. 23, 2008).

[0208] As used herein, LNA compounds include, but are not limited to, compounds having at least one bridge between the 4′ and the 2′ position of the sugar wherein each of the bridges independently comprises 1 or from 2 to 4 linked groups independently selected from [C(R₁)(R₂)]ₙ—, —C(R₁)═C(R₂)—, —C(R₁)═N—, —C(═NR₁)—, —C(═O)—, —C(═S)—, —O—, —Si(R₁)₂—, —S(═O)ₓ— and —N(R₁)—; wherein: x is 0, 1, or 2; n is 1, 2, 3, or 4; each R₁ and R₂ is, independently, H, a protecting group, hydroxyl, C₂-C₁₂ alkyl, substituted C₁-C₁₂ alkyl, C₂-C₁₂ alkenyl, substituted C₂-C₁₂ alkenyl, C₂-C₁₂ alkynyl, substituted C₂-C₁₂ alkynyl, C₅-C₂₀ aryl, substituted C₅-C₂₀ aryl, a heterocycle radical, a substituted heterocycle radical, heteroaryl, substituted heteroaryl, C₅-C₇ alicyclic radical, substituted C₅-C₇ alicyclic radical, halogen, OJ₁, NJ₁J₂, SJ₁, N₃, COOJ₁, acyl (C(═O)—H), substituted acyl, CN, sulfonyl (S(═O)₂-J₁), or sulfoxyl (S(═O)-J₁); and each J₁ and J₂ is, independently, H, C₁-C₁₂ alkyl, substituted C₁-C₁₂ alkyl, C₂-C₁₂ alkenyl, substituted C₂-C₁₂ alkenyl, C₂-C₁₂ alkynyl, substituted C₂-C₁₂ alkynyl, C₅-C₂₀ aryl, substituted C₅-C₂₀ aryl, acyl (C(═O)—H), substituted acyl, a heterocycle radical, a substituted heterocycle radical, C₁-C₁₂ aminoalkyl, substituted C₁-C₁₂ aminoalkyl or a protecting group.

[0209] Examples of 4′-2′ bridging groups encompassed within the definition of LNA include, but are not limited to one of formulae: —[C(R₁)(R₂)]ₙ—, —[C(R₁)(R₂)]ₙ—O—, —C(R₁R₂)—N(R₁)—O— or —C(R₁R₂)—O—N(R₁)—. Furthermore, other bridging groups encompassed with the definition of LNA are 4′-CH₂-2′, 4′-(CH₂)₂-2′, 4′-(CH₂)₃-2′, 4′-CH₂—O-2′, 4′-(CH₂)₂—O-2′, 4′-CH₂—O—N(R₁)-2′ and 4′-CH₂—N(R₁)—O-2′-bridges, wherein each R₁ and R₂ is, independently, H, a protecting group or C₁-C₁₂ alkyl.

[0210] Also included within the definition of LNA according to the invention are LNAs in which the 2′-hydroxyl group of the ribosyl sugar ring is connected to the 4′ carbon atom of the sugar ring, thereby forming a bridge to form the bicyclic sugar moiety. The bridge can be a methylene (—CH₂—) group connecting the 2′ oxygen atom and the 4′ carbon atom, for which the term methyleneoxy (4′-CH₂—O-2′) LNA is used. Furthermore, in the case of the bicyclic sugar moiety having an ethylene bridging group in this position, the term ethyleneoxy (4′-CH₂CH₂—O-2′) LNA is used. A-L-methyleneoxy (4′-CH₂—O-2′), an isomer of methyleneoxy (4′-CH₂—O-2′) LNA is also encompassed within the definition of LNA, as used herein.

[0211] As used herein, a “spacer” refers to a nucleoside-replacement group (e.g., a non-nucleoside group that replaces a nucleoside present in a STMN2 parent oligonucleotide). The spacer is characterized by the lack of a nucleotide base and by the replacement of the nucleoside sugar moiety with a non-sugar substitute. The non-sugar substitute group of a spacer lacks an aldehyde, ketone, acetal, ketal, hemiacetal or hemiketal group. The non-sugar substitute group of a spacer is thus capable of connecting to the 3′ and 5′ positions of the nucleosides adjacent to the spacer through an internucleoside linker as described herein, but not capable of forming a covalent bond with a nucleotide base (i.e., not capable of linking a nucleobase to another group, such as an internucleoside linkage, conjugate group, or terminal group in an oligonucleotide). Generally, a STMN2 oligonucleotide with a spacer is described in relation to a STMN2 parent oligonucleotide, wherein the spacer replaces a nucleoside of the STMN2 parent oligonucleotide. In all embodiments of the present disclosure, a spacer cannot hybridize to a nucleoside comprising a nucleobase at the corresponding position of a STMN2 transcript, within the numerical order of the length of the AON oligonucleotide (i.e., if the spacer is positioned after nucleoside 4 of an AON (i.e., at position 5 from the 5′-end), the spacer is not complementary to the nucleoside (A, C, G, or U) at the same corresponding position of the target STMN2 transcript)).

[0212] As used herein, “mismatch” or a “non-complementary group” refers to the case when a group (e.g., nucleobase) of a first nucleic acid is not capable of pairing with the corresponding group (e.g., nucleobase) of a second or target nucleic acid.

[0213] As used herein, “modified internucleoside linkage” refers to a substitution or any change from a naturally occurring internucleoside linkage (e.g., a phosphodiester internucleoside bond).

[0214] As used herein, “modified nucleobase” means any nucleobase other than adenine, cytosine, guanine, thymine, or uracil. Examples of a modified nucleobase include 5-methyl cytosine, pseudouridine, or 5-methoxyuridine. An “unmodified nucleobase” means the purine bases adenine (A) and guanine (G), and the pyrimidine bases thymine (T), cytosine (C), and uracil (U).

[0215] As used herein, a “modified nucleoside” means a nucleoside having, independently, a modified sugar moiety and/or modified nucleobase. A universal base is a modified nucleobase that can pair with any one of the five unmodified nucleobases. Modified nucleosides include abasic nucleosides, which lack a nucleobase. However, modified nucleosides do not include spacers or other groups that are incapable of linking a nucleobase.

[0216] As used herein, “linked nucleosides” are nucleosides that are connected in a contiguous sequence (i.e., no additional nucleosides are presented between those that are linked). In various embodiments, an oligonucleotide may have different segments of linked nucleosides connected through a spacer. Here, the spacer (i.e., nucleoside replacement) is not considered a nucleoside and therefore, divides up the oligonucleotide into two segments of linked nucleosides. The oligonucleotide may have a first segment of Y linked nucleosides (e.g., Y nucleosides that are connected in a contiguous sequence), followed by a spacer, and then a second segment of Z linked nucleosides. Here, the Y and Z linked nucleosides is described in either the 5′ to 3′ direction or the 3′ to 5′ direction. In various embodiments, the first segment consists of 7 or fewer linked nucleosides (e.g., Y=7 or fewer) whereas the second segment comprises 8 or more linked nucleosides (e.g., Z=8 or more).

[0217] As used herein, “modified oligonucleotide” means an oligonucleotide comprising at least one (i.e., one or more) modified internucleoside linkage, modified sugar, and/or modified nucleobase.

[0218] As used herein, “modified sugar” or “modified sugar moiety” means a modified furanosyl sugar moiety or a modified sugar moiety having other than a furanosyl moiety that can link a nucleobase to another group, such as an internucleoside linkage, conjugate group, or terminal group in an oligonucleotide.

[0219] As used herein, “monomer” means a single unit of an oligomer. Monomers include, but are not limited to, nucleosides and nucleotides, whether naturally occurring or modified.

[0220] As used herein, “motif” means the pattern of unmodified and modified nucleosides in an antisense compound.

[0221] As used herein, “natural sugar moiety” means a sugar moiety found in DNA (2′-H) or RNA (2′-OH).

[0222] As used herein, “naturally occurring internucleoside linkage” means a 3′ to 5′ phosphodiester linkage.

[0223] As used herein, “non-complementary nucleobases” refers to a pair of nucleobases that do not form hydrogen bonds with one another or otherwise support hybridization.

[0224] As used herein, “nucleic acid” refers to molecules composed of monomeric nucleotides. A nucleic acid includes, but is not limited to, ribonucleic acids (RNA), deoxyribonucleic acids (DNA), single-stranded nucleic acids, double-stranded nucleic acids, non-coding RNA, small interfering ribonucleic acids (siRNA), short-hairpin RNA (shRNA), and microRNAs (miRNA).

[0225] As used herein, “nucleobase” means a heterocyclic moiety capable of base pairing with a base of another nucleic acid.

[0226] As used herein, “nucleobase complementarity” refers to a nucleobase that is capable of base pairing with another nucleobase. For example, in DNA, adenine (A) is complementary to thymine (T). For example, in RNA, adenine (A) is complementary to uracil (U). In certain embodiments, complementary nucleobase refers to a nucleobase of an antisense compound that is capable of base pairing with a nucleobase of its target nucleic acid. For example, if a nucleobase at a certain position of an antisense compound is capable of hydrogen bonding with a nucleobase at a certain position of a target nucleic acid, then the position of hydrogen bonding between the oligonucleotide and the target nucleic acid is considered to be complementary at that nucleobase pair.

[0227] As used herein, “nucleobase sequence” means the order of nucleobases independent of any sugar, linkage, and/or nucleobase modification.

[0228] As used herein, “nucleoside” refers to a nucleobase linked to a sugar. The term “nucleoside” also includes a “modified nucleoside” which has independently, a modified sugar moiety and/or modified nucleobase.

[0229] As used herein, “nucleoside mimetic” includes those structures used to replace the sugar or the sugar and the base and not necessarily the linkage at one or more positions of an oligomeric compound such as for example nucleoside mimetics having morpholino, cyclohexenyl, cyclohexyl, tetrahydropyranyl, bicyclo, or tricyclo sugar mimetics, e.g., non-furanose sugar units. Nucleotide mimetic includes those structures used to replace the nucleoside and the linkage at one or more positions of an oligomeric compound such as for example peptide nucleic acids or morpholinos (morpholinos linked by a phosphorodiamidate or other non-phosphodiester linkage). Sugar surrogate overlaps with the slightly broader term nucleoside mimetic but is intended to indicate replacement of the sugar unit (furanose ring) only. The tetrahydropyranyl rings provided herein are illustrative of an example of a sugar surrogate wherein the furanose sugar group has been replaced with a tetrahydropyranyl ring system. “Mimetic” refers to groups that are substituted for a sugar, a nucleobase, and/or internucleoside linkage. Generally, a mimetic is used in place of the sugar or sugar-internucleoside linkage combination, and the nucleobase is maintained for hybridization to a selected target.

[0230] As used herein, “nucleotide” means a nucleoside having a phosphate group covalently linked to the sugar portion of the nucleoside.

[0231] As used herein, “oligomeric compound” or “oligomer” means a polymer of linked monomeric subunits which is capable of hybridizing to at least a region of a nucleic acid molecule.

[0232] As used herein, “oligonucleotide” means a polymer of one or more segments of linked nucleosides each of which can be modified or unmodified, independent one from another.

[0233] As used herein, “hotspot region” is a range of nucleobases on a target nucleic acid amenable to oligomeric compound-mediated modulation of the splicing of the target nucleic acid.

[0234] As used herein, “hybridization” means the pairing or annealing of complementary oligonucleotides and/or nucleic acids. While not limited to a particular mechanism, the most common mechanism of hybridization involves hydrogen bonding, which may be Watson-Crick, Hoogsteen or reversed Hoogsteen hydrogen bonding between complementary nucleobases.

[0235] As used herein, “increasing the amount of activity” refers to more transcriptional expression, more accurate splicing resulting in full length mature mRNA and/or protein expression, and/or more activity relative to the transcriptional expression or activity in an untreated or control sample.

### Antisense Therapeutics

[0236] Antisense therapeutics are a class of nucleic acid-based compounds that can be used to modulate a transcript, such as mRNA. In various embodiments, antisense therapeutics comprise one or more spacers and can be used to modulate a transcript that is transcribed from a gene, such as a STMN2 pre-mRNA comprising a cryptic exon.

[0237] Antisense therapeutics may be single- or double-stranded deoxyribonucleic acid (DNA)-based, ribonucleic acid (RNA)-based, or DNA/RNA chemical analogue compounds. In general, antisense therapeutics are designed to include a sequence that is complementary or nearly complementary to an mRNA or pre-mRNA sequence transcribed from a given gene in order to promote binding between the antisense therapeutic and the pre-mRNA or mRNA. In certain embodiments, antisense therapeutics act by binding to an mRNA or pre-mRNA, thereby inhibiting protein translation, altering pre-mRNA splicing into mature mRNA (e.g., by preventing appropriate proteins such as splicing activator proteins from binding), and/or causing destruction of mRNA. In certain embodiments, the antisense therapeutic sequence is complementary to a portion of a targeted gene's or mRNA's sense sequence. In certain embodiments, antisense therapeutics described herein are oligonucleotide-based compounds that include an oligonucleotide sequence complementary to a pre-mRNA sense, or a portion thereof, and one or more spacers. In certain embodiments, antisense therapeutics described herein can also be nucleotide chemical analog-based compounds.

[0238] In certain embodiments, an oligonucleotide, such as disclosed herein, may be an oligonucleotide sequence of 5 to 100 oligonucleotide units in length, for example, 10 to 60 oligonucleotide units in length, for example, 12 to 50 oligonucleotide units in length, 14 to 40 oligonucleotide units in length, 10 to 30 oligonucleotide units in length, for example, 14 to 30 oligonucleotide units in length, for example, 14 to 25 or 15 to 22 oligonucleotide units in length, or 18, 19, 20, 21, 22, 23, 24, or 25 oligonucleotide units in length. As used herein, an “oligonucleotide unit” refers to either a nucleoside (e.g., a nucleoside which includes a sugar and/or a nucleobase) or a nucleoside-replacement group (e.g., a spacer) of the oligonucleotide.

[0239] In particular embodiments, the oligonucleotides are 25 oligonucleotide units in length. In particular embodiments, the oligonucleotides are 23 oligonucleotide units in length. In particular embodiments, the oligonucleotides are 21 oligonucleotide units in length. In particular embodiments, the oligonucleotides are 19 oligonucleotide units in length. In various embodiments, the oligonucleotide is at least 18, at least 19, at least 20, at least 21, at least 22, at least 23, at least 24, or at least 25 oligonucleotide units in length. In various embodiments, the oligonucleotide is at least 18 oligonucleotide units in length. In various embodiments, the oligonucleotide is at least 19 oligonucleotide units in length. In various embodiments, the oligonucleotide is at least 20 oligonucleotide units in length. In various embodiments, the oligonucleotide is at least 21 oligonucleotide units in length. In various embodiments, the oligonucleotide is at least 22 oligonucleotide units in length. In various embodiments, the oligonucleotide is at least 23 oligonucleotide units in length. In various embodiments, the oligonucleotide is at least 24 oligonucleotide units in length. In various embodiments, the oligonucleotide is at least 25 oligonucleotide units in length.

[0240] In certain embodiments, AONs may include chemically modified nucleosides (for example, 2′-O-methylated nucleosides or 2′-O-(2-methoxyethyl) nucleosides) as well as modified internucleoside linkages (for example, phosphorothioate linkages). In certain embodiments, AONs described herein include oligonucleotide sequences that are complementary to RNA sequences, such as STMN2 mRNA sequences. In certain embodiments, AONs described herein can include chemically modified nucleosides and modified internucleoside linkages (for example, phosphorothioate linkages). In particular embodiments, AONs described herein include one or more spacers.

[0241] In various embodiments, the oligonucleotides comprise one or more spacers. In particular embodiments, the oligonucleotides comprise one spacer. In various embodiments, the oligonucleotides comprise two spacers. For example, the oligonucleotide includes 23 oligonucleotide units with 21 nucleobases and two nucleoside replacement groups (e.g., two spacers). Further embodiments of oligonucleotides with one spacer and oligonucleotides with two spacers are described herein.

[0242] In some embodiments, an antisense oligonucleotide can be, but is not limited to, inhibitors of a gene transcript (for example, shRNAs, siRNAs, PNAs, LNAs, 2′-O-methyl (2′Ome) antisense oligonucleotide (AON), 2′-O-(2-methoxyethyl) (MOE) AON, or morpholino oligomers (e.g., phosphorodiamidate morpholino (PMO))), or compositions that include such compounds. In some embodiments an oligonucleotide is an antisense oligonucleotide (AON) comprising 2′Ome (e.g., a AON comprising one or more 2′Ome modified sugar), MOE (e.g., a AON comprising one or more MOE modified sugar), peptide nucleic acids (e.g., a AON comprising one or more N-(2-aminoethyl)-glycine units linked by amide bonds or carbonyl methylene linkage as repeating units in place of a sugar-phosphate backbone), locked nucleic acids (e.g., a AON comprising one or more locked ribose, and can be a mixture of 2′-deoxy nucleotides or 2′Ome nucleotides), c-ET (e.g., a AON comprising one or more cET sugar), constrained methoxyethyl (cMOE) (e.g., a AON comprising one or more cMOE sugar), morpholino oligomer (e.g., a AON comprising a backbone comprising one or more PMO), deoxy-2′-fluoro nucleoside (e.g., a AON comprising one or more 2′-fluoro-(3-D-arabinonucleoside), tricyclo-DNAs (tcDNA) (e.g., a AON comprising one or more tcDNA modified sugar), 2′-0,4′-C-Ethylene-bridged nucleic acid (ENA) (e.g., a AON comprising one or more ENA modified sugar), or hexitol nucleic acids (HNA) (e.g., a AON comprising one or more HNA modified sugar). In some embodiments, a AON comprises one or more internucleoside linkage independently selected from a phosphorothioate linkage, phosphodiester linkage, phosphotriester linkage, methylphosphonate linkage, phosphoramidate linkage, a phosphoramidothioate linkage, a thiophosphorodiamidate linkage, phosphorodiamidate morpholino (PMO) (morpholino) linkage, PNA linkage, or any combination of phosphorothioate linkage, phosphodiester linkage, a phosphotriester linkage, methylphosphonate linkage, phosphoramidate linkage, a phosphoramidothioate linkage, thiophosphorodiamidate linkage, phosphorodiamidate morpholino (PMO) (morpholino) linkage, and PNA linkage. In some embodiments, a STMN2 AON comprises one or more phosphorothioate linkage, phosphodiester linkage, or a combination of phosphorothioate and phosphodiester linkages.

[0243] Peptide nucleic acids (PNAs) are short, artificially synthesized polymers with a structure that mimics DNA or RNA. PNAs include a backbone composed of repeating N-(2-aminoethyl)-glycine units linked by peptide bonds. In certain embodiments, PNAs described herein can be used as antisense therapeutics that bind to RNA sequences with high specificity and increase, restore, and/or stabilize levels (e.g., full length STMN2 mRNA or protein levels) and/or activity (e.g., biological activity, for example, STMN2 activity).

[0244] Locked nucleic acids (LNAs) are oligonucleotide sequences that include one or more modified RNA nucleotides in which the ribose moiety is modified with an extra bridge connecting the 2′ oxygen and 4′ carbon. LNAs are believed to have higher Tm's than analogous oligonucleotide sequences. In certain embodiments, LNAs described herein can be used as antisense therapeutics that bind to RNA sequences with high specificity. For example, LNAs can bind to STMN2 pre-RNA and repress premature polyadenylation of STMN2 pre-mRNA, and increase, restore, and/or stabilize STMN2 levels (e.g., STMN2 mRNA or protein levels) and/or activity (e.g., biological activity, for example, STMN2 activity).

[0245] Morpholino oligomers are oligonucleotide compounds that include DNA bases attached to a backbone of methylenemorpholine rings linked through phosphorodiamidate groups. In certain embodiments, morpholino oligomers of the present invention can be designed to bind to specific pre-RNA sequence of interest. For example, morpholino oligomers bind to STMN2 pre-RNA thereby repressing premature polyadenylation of the pre-mRNA, and increase, restore, and/or stabilize STMN2 levels (e.g., STMN2 mRNA or protein levels) and/or activity (e.g., biological activity, for example, STMN2 activity). In certain embodiments, STMN2 morpholino oligomers described herein can be used as antisense therapeutics that bind to STMN2 pre-mRNA sequences with high specificity and repress premature polyadenylation of STMN2 pre-mRNA, and increase, restore, and/or stabilize STMN2 levels (e.g., STMN2 mRNA or protein levels) and/or activity (e.g., biological activity, for example, STMN2 activity). In certain embodiments, STMN2 morpholino oligomers described herein can also be used to bind STMN2 pre-mRNA sequences, altering STMN2 pre-mRNA splicing and STMN2 gene expression, and increase, restore, and/or stabilize STMN2 levels (e.g., STMN2 mRNA or protein levels) and/or activity (e.g., biological activity, for example, STMN2 activity).

STMN2 Oligonucleotides Complementary to STMN2 Transcript with a Cryptic Exon

[0246] In some embodiments, a STMN2 AON includes a sequence that is between 85 and 98% complementary to a sequence that shares at least 90% (e.g., 90%, 91%, 92%, 93%, 94%, 95%, 96%, 97%, 98%, 99%, or 100%) identity to a region of a STMN2 transcript that includes a cryptic exon (e.g., SEQ ID NO: 1339 or SEQ ID NO: 1341). In some embodiments, a STMN2 AON includes a sequence that is between 90-95% complementary to a sequence that shares at least 90% (e.g., 90%, 91%, 92%, 93%, 94%, 95%, 96%, 97%, 98%, 99%, or 100%) identity to a region of a STMN2 transcript that includes a cryptic exon (e.g., SEQ ID NO: 1339 or SEQ ID NO: 1341). In particular embodiments, a STMN2 AON includes a sequence that is between 85% and 90% complementary to a sequence that shares at least 90% (e.g., 90%, 91%, 92%, 93%, 94%, 95%, 96%, 97%, 98%, 99%, or 100%) identity to a region of a STMN2 transcript that includes a cryptic exon (e.g., SEQ ID NO: 1339 or SEQ ID NO: 1341). In particular embodiments, a STMN2 AON includes a sequence that is between 84% to 88% complementary to a sequence that shares at least 90% (e.g., 90%, 91%, 92%, 93%, 94%, 95%, 96%, 97%, 98%, 99%, or 100%) identity to a region of a STMN2 transcript that includes a cryptic exon (e.g., SEQ ID NO: 1339 or SEQ ID NO: 1341). In particular embodiments, a STMN2 AON includes a sequence that is between 89% to 92% complementary to a sequence that shares at least 90% (e.g., 90%, 91%, 92%, 93%, 94%, 95%, 96%, 97%, 98%, 99%, or 100%) identity to a region of a STMN2 transcript that includes a cryptic exon (e.g., SEQ ID NO: 1339 or SEQ ID NO: 1341). In particular embodiments, a STMN2 AON includes a sequence that is between 94% to 96% complementary to a sequence that shares at least 90% (e.g., 90%, 91%, 92%, 93%, 94%, 95%, 96%, 97%, 98%, 99%, or 100%) identity to a region of a STMN2 transcript that includes a cryptic exon (e.g., SEQ ID NO: 1339 or SEQ ID NO: 1341).

[0247] In various embodiments, a STMN2 AON comprises a sequence that shares at least 85% identity with an equal length portion of any one of SEQ ID NOs: 1-466, SEQ ID NOs: 893-1338, SEQ ID NOs: 1342-1366, or SEQ ID NOs: 1392-1664. In various embodiments, a STMN2 AON comprises a sequence that shares at least 90% identity with an equal length portion of any one of SEQ ID NOs: 1-466, SEQ ID NOs: 893-1338, SEQ ID NOs: 1342-1366, or SEQ ID NOs: 1392-1664.

[0248] In various embodiments, the region of the STMN2 transcript targeted by the STMN2 AON is the cryptic exon sequence. In various embodiments, the region of the STMN2 transcript targeted by the STMN2 AON is a sequence located upstream or downstream (e.g., 100 or 200 bases upstream or downstream) of the cryptic exon sequence. In some embodiments, the STMN2 AON comprises a spacer and has a segment having at most 7 linked nucleosides. In some embodiments, the STMN2 AON comprises a spacer and has a segment having at most 6, 5, 4, 3, or 2 linked nucleosides.

[0249] STMN2 AON binding specificity can be assessed via measurement of parameters such as dissociation constant, melting temperature ®, or other criteria such as changes in protein or RNA expression levels or other assays that measure STMN2 activity or expression.

[0250] In some embodiments, a STMN2 AON can include a non-duplexed oligonucleotide. In some embodiments, a STMN2 AON can include a duplex of two oligonucleotides where the first oligonucleotide includes a nucleobase sequence that is completely or almost completely complementary to a STMN2 pre-mRNA sequence and the second oligonucleotide includes a nucleobase sequence that is complementary to the nucleobase sequence of the first oligonucleotide.

[0251] In some embodiments, a STMN2 AON can target STMN2 pre-mRNAs that include a cryptic exon produced from STMN2 genes of one or more species. For example, a STMN2 AON can target a STMN2 pre-mRNA, which includes a cryptic exon, of a mammalian STMN2 gene, for example, a human (i.e., Homo sapiens) STMN2 gene. In particular embodiments, the STMN2 AON targets a human STMN2 pre-mRNA, which includes a cryptic exon. In some embodiments, the STMN2 AON includes a nucleobase sequence that is complementary to a nucleobase sequence of a STMN2 gene or a STMN2 pre-mRNA, which includes a cryptic exon, or a portion thereof.

[0252] STMN2 AONs described herein include antisense oligonucleotides comprising the oligonucleotide sequences listed in Table 1 below:

TABLE 1
STMN2 AON Sequences, in each one or more spacers described in the present
disclosure are incorporated for generation of an oligonucleotide of the present invention

| SEQ | | | SEQ | |
|---|---|---|---|---|
| ID | AON Sequence* | | ID | Target Sequence |
| NO: | (5′→3′) | Region | NO: | (5′→3′) |
| 1 | GGAGGGATACCTGTATATTACAAGT | | 447 | ACTTGTAATATACAGGTATCCCTCC |
| 2 | AGGAGGGATACCTGTATATTACAAG | | 448 | CTTGTAATATACAGGTATCCCTCCT |
| 3 | CAGGAGGGATACCTGTATATTACAA | | 449 | TTGTAATATACAGGTATCCCTCCTG |
| 4 | CCAGGAGGGATACCTGTATATTACA | | 450 | TGTAATATACAGGTATCCCTCCTGG |
| 5 | ACCAGGAGGGATACCTGTATATTAC | | 451 | GTAATATACAGGTATCCCTCCTGGT |
| 6 | TACCAGGAGGGATACCTGTATATTA | | 452 | TAATATACAGGTATCCCTCCTGGTA |
| 7 | TTACCAGGAGGGATACCTGTATATT | | 453 | AATATACAGGTATCCCTCCTGGTAA |
| 8 | CTTACCAGGAGGGATACCTGTATAT | | 454 | ATATACAGGTATCCCTCCTGGTAAG |
| 9 | GCTTACCAGGAGGGATACCTGTATA | | 455 | TATACAGGTATCCCTCCTGGTAAGC |
| 10 | AGCTTACCAGGAGGGATACCTGTAT | | 456 | ATACAGGTATCCCTCCTGGTAAGCT |
| 11 | GAGCTTACCAGGAGGGATACCTGTA | | 457 | TACAGGTATCCCTCCTGGTAAGCTC |
| 12 | AGAGCTTACCAGGAGGGATACCTGT | | 458 | ACAGGTATCCCTCCTGGTAAGCTCT |
| 13 | CAGAGCTTACCAGGAGGGATACCTG | | 459 | CAGGTATCCCTCCTGGTAAGCTCTG |
| 14 | CCAGAGCTTACCAGGAGGGATACCT | | 460 | AGGTATCCCTCCTGGTAAGCTCTGG |
| 15 | ACCAGAGCTTACCAGGAGGGATACC | | 461 | GGTATCCCTCCTGGTAAGCTCTGGT |
| 16 | TACCAGAGCTTACCAGGAGGGATAC | | 462 | GTATCCCTCCTGGTAAGCTCTGGTA |
| 17 | ATACCAGAGCTTACCAGGAGGGATA | | 463 | TATCCCTCCTGGTAAGCTCTGGTAT |
| 18 | AATACCAGAGCTTACCAGGAGGGAT | | 464 | ATCCCTCCTGGTAAGCTCTGGTATT |
| 19 | TAATACCAGAGCTTACCAGGAGGGA | | 465 | TCCCTCCTGGTAAGCTCTGGTATTA |
| 20 | ATAATACCAGAGCTTACCAGGAGGG | | 466 | CCCTCCTGGTAAGCTCTGGTATTAT |
| 21 | CATAATACCAGAGCTTACCAGGAGG | | 467 | CCTCCTGGTAAGCTCTGGTATTATG |
| 22 | ACATAATACCAGAGCTTACCAGGAG | | 468 | CTCCTGGTAAGCTCTGGTATTATGT |
| 23 | GACATAATACCAGAGCTTACCAGGA | | 469 | TCCTGGTAAGCTCTGGTATTATGTC |
| 24 | AGACATAATACCAGAGCTTACCAGG | | 470 | CCTGGTAAGCTCTGGTATTATGTCT |
| 25 | AAGACATAATACCAGAGCTTACCAG | | 471 | CTGGTAAGCTCTGGTATTATGTCTT |
| 26 | TAAGACATAATACCAGAGCTTACCA | | 472 | TGGTAAGCTCTGGTATTATGTCTTA |
| 27 | TTAAGACATAATACCAGAGCTTACC | | 473 | GGTAAGCTCTGGTATTATGTCTTAA |
| 28 | GTTAAGACATAATACCAGAGCTTAC | | 474 | GTAAGCTCTGGTATTATGTCTTAAC |
| 29 | TGTTAAGACATAATACCAGAGCTTA | | 475 | TAAGCTCTGGTATTATGTCTTAACA |
| 30 | ATGTTAAGACATAATACCAGAGCTT | branch | 476 | AAGCTCTGGTATTATGTCTTAACAT |
| | | point 1 | | |
| 31 | AATGTTAAGACATAATACCAGAGCT | branch | 477 | AGCTCTGGTATTATGTCTTAACATT |
| | | point 1 | | |
| 32 | AAATGTTAAGACATAATACCAGAGC | branch | 478 | GCTCTGGTATTATGTCTTAACATTT |
| | | point 1 | | |
| 33 | AAAATGTTAAGACATAATACCAGAG | branch | 479 | CTCTGGTATTATGTCTTAACATTTT |
| | | point 1 | | |
| 34 | AAAAATGTTAAGACATAATACCAGA | branch | 480 | TCTGGTATTATGTCTTAACATTTTT |
| | | point 1 | | |
| 35 | TAAAAATGTTAAGACATAATACCAG | branch | 481 | CTGGTATTATGTCTTAACATTTTTA |
| | | point 1 | | |
| 36 | TTAAAAATGTTAAGACATAATACCA | branch | 482 | TGGTATTATGTCTTAACATTTTTAA |
| | | point 1 | | |
| 37 | TTTAAAAATGTTAAGACATAATACC | branch | 483 | GGTATTATGTCTTAACATTTTTAAA |
| | | point 1 | | |
| 38 | ATTTAAAAATGTTAAGACATAATAC | branch | 484 | GTATTATGTCTTAACATTTTTAAAT |
| | | point 1 | | |
| 39 | GATTTAAAAATGTTAAGACATAATA | branch | 485 | TATTATGTCTTAACATTTTTAAATC |
| | | point 1 | | |
| 40 | AGATTTAAAAATGTTAAGACATAAT | branch | 486 | ATTATGTCTTAACATTTTTAAATCT |
| | | point 1 | | |
| 41 | TAGATTTAAAAATGTTAAGACATAA | branch | 487 | TTATGTCTTAACATTTTTAAATCTA |
| | | point 1 | | |
| 42 | ATAGATTTAAAAATGTTAAGACATA | branch | 488 | TATGTCTTAACATTTTTAAATCTAT |
| | | point 1 | | |
| 43 | CATAGATTTAAAAATGTTAAGACAT | branch | 489 | ATGTCTTAACATTTTTAAATCTATG |
| | | point 1 | | |
| 44 | CCATAGATTTAAAAATGTTAAGACA | branch | 490 | TGTCTTAACATTTTTAAATCTATGG |
| | | point 1 | | |
| 45 | ACCATAGATTTAAAAATGTTAAGAC | branch | 491 | GTCTTAACATTTTTAAATCTATGGT |
| | | point 1 | | |
| 46 | TACCATAGATTTAAAAATGTTAAGA | branch | 492 | TCTTAACATTTTTAAATCTATGGTA |
| | | point 1 | | |
| 47 | TTACCATAGATTTAAAAATGTTAAG | | 493 | CTTAACATTTTTAAATCTATGGTAA |
| 48 | ATTACCATAGATTTAAAAATGTTAA | | 494 | TTAACATTTTTAAATCTATGGTAAT |
| 49 | GATTACCATAGATTTAAAAATGTTA | | 495 | TAACATTTTTAAATCTATGGTAATC |
| 50 | AGATTACCATAGATTTAAAAATGTT | Branch | 496 | AACATTTTTAAATCTATGGTAATCT |
| | | point 2 | | |
| 51 | AAGATTACCATAGATTTAAAAATGT | Branch | 497 | ACATTTTTAAATCTATGGTAATCTT |
| | | point 2 | | |
| 52 | AAAGATTACCATAGATTTAAAAATG | Branch | 498 | CATTTTTAAATCTATGGTAATCTTT |
| | | point 2 | | |
| 53 | TAAAGATTACCATAGATTTAAAAAT | Branch | 499 | ATTTTTAAATCTATGGTAATCTTTA |
| | | point 2 | | |
| 54 | GTAAAGATTACCATAGATTTAAAAA | Branch | 500 | TTTTTAAATCTATGGTAATCTTTAC |
| | | point 2 | | |
| 55 | TGTAAAGATTACCATAGATTTAAAA | Branch | 501 | TTTTAAATCTATGGTAATCTTTACA |
| | | point 2 | | |
| 56 | TTGTAAAGATTACCATAGATTTAAA | Branch | 502 | TTTAAATCTATGGTAATCTTTACAA |
| | | point 2 | | |
| 57 | TTTGTAAAGATTACCATAGATTTAA | Branch | 503 | TTAAATCTATGGTAATCTTTACAAA |
| | | point 2 | | |
| 58 | TTTTGTAAAGATTACCATAGATTTA | Branch | 504 | TAAATCTATGGTAATCTTTACAAAA |
| | | point 2 | | |
| 59 | ATTTTGTAAAGATTACCATAGATTT | Branch | 505 | AAATCTATGGTAATCTTTACAAAAT |
| | | point 2 | | |
| 60 | TATTTTGTAAAGATTACCATAGATT | Branch | 506 | AATCTATGGTAATCTTTACAAAATA |
| | | point 2 | | |
| 61 | ATATTTTGTAAAGATTACCATAGAT | Branch | 507 | ATCTATGGTAATCTTTACAAAATAT |
| | | point 2 | | |
| 62 | AATATTTTGTAAAGATTACCATAGA | Branch | 508 | TCTATGGTAATCTTTACAAAATATT |
| | | point 2 | | |
| 63 | AAATATTTTGTAAAGATTACCATAG | Branch | 509 | CTATGGTAATCTTTACAAAATATTT |
| | | point 2 | | |
| 64 | AAAATATTTTGTAAAGATTACCATA | Branch | 510 | TATGGTAATCTTTACAAAATATTTT |
| | | point 2 | | |
| 65 | TAAAATATTTTGTAAAGATTACCAT | Branch | 511 | ATGGTAATCTTTACAAAATATTTTA |
| | | point 2 | | |
| 66 | GTAAAATATTTTGTAAAGATTACCA | Branch | 512 | TGGTAATCTTTACAAAATATTTTAC |
| | | point 2 | | |
| 67 | AGTAAAATATTTTGTAAAGATTACC | | 513 | GGTAATCTTTACAAAATATTTTACT |
| 68 | AAGTAAAATATTTTGTAAAGATTAC | | 514 | GTAATCTTTACAAAATATTTTACTT |
| 69 | GAAGTAAAATATTTTGTAAAGATTA | | 515 | TAATCTTTACAAAATATTTTACTTC |
| 70 | GGAAGTAAAATATTTTGTAAAGATT | | 516 | AATCTTTACAAAATATTTTACTTCC |
| 71 | CGGAAGTAAAATATTTTGTAAAGAT | | 517 | ATCTTTACAAAATATTTTACTTCCG |
| 72 | TCGGAAGTAAAATATTTTGTAAAGA | | 518 | TCTTTACAAAATATTTTACTTCCGA |
| 73 | TTCGGAAGTAAAATATTTTGTAAAG | | 519 | CTTTACAAAATATTTTACTTCCGAA |
| 74 | GTTCGGAAGTAAAATATTTTGTAAA | | 520 | TTTACAAAATATTTTACTTCCGAAC |
| 75 | AGTTCGGAAGTAAAATATTTTGTAA | | 521 | TTACAAAATATTTTACTTCCGAACT |
| 76 | GAGTTCGGAAGTAAAATATTTTGTA | | 522 | TACAAAATATTTTACTTCCGAACTC |
| 77 | TGAGTTCGGAAGTAAAATATTTTGT | | 523 | ACAAAATATTTTACTTCCGAACTCA |
| 78 | ATGAGTTCGGAAGTAAAATATTTTG | | 524 | CAAAATATTTTACTTCCGAACTCAT |
| 79 | TATGAGTTCGGAAGTAAAATATTTT | | 525 | AAAATATTTTACTTCCGAACTCATA |
| 80 | ATATGAGTTCGGAAGTAAAATATTT | | 526 | AAATATTTTACTTCCGAACTCATAT |
| 81 | TATATGAGTTCGGAAGTAAAATATT | | 527 | AATATTTTACTTCCGAACTCATATA |
| 82 | GTATATGAGTTCGGAAGTAAAATAT | | 528 | ATATTTTACTTCCGAACTCATATAC |
| 83 | GGTATATGAGTTCGGAAGTAAAATA | | 529 | TATTTTACTTCCGAACTCATATACC |
| 84 | AGGTATATGAGTTCGGAAGTAAAAT | | 530 | ATTTTACTTCCGAACTCATATACCT |
| 85 | CAGGTATATGAGTTCGGAAGTAAAA | | 531 | TTTTACTTCCGAACTCATATACCTG |
| 86 | CCAGGTATATGAGTTCGGAAGTAAA | | 532 | TTTACTTCCGAACTCATATACCTGG |
| 87 | CCCAGGTATATGAGTTCGGAAGTAA | | 533 | TTACTTCCGAACTCATATACCTGGG |
| 88 | CCCCAGGTATATGAGTTCGGAAGTA | | 534 | TACTTCCGAACTCATATACCTGGGG |
| 89 | TCCCCAGGTATATGAGTTCGGAAGT | | 535 | ACTTCCGAACTCATATACCTGGGGA |
| 90 | ATCCCCAGGTATATGAGTTCGGAAG | | 536 | CTTCCGAACTCATATACCTGGGGAT |
| 91 | AATCCCCAGGTATATGAGTTCGGAA | | 537 | TTCCGAACTCATATACCTGGGGATT |
| 92 | AAATCCCCAGGTATATGAGTTCGGA | | 538 | TCCGAACTCATATACCTGGGGATTT |
| 93 | AAAATCCCCAGGTATATGAGTTCGG | | 539 | CCGAACTCATATACCTGGGGATTTT |
| 94 | TAAAATCCCCAGGTATATGAGTTCG | | 540 | CGAACTCATATACCTGGGGATTTTA |
| 95 | ATAAAATCCCCAGGTATATGAGTTC | | 541 | GAACTCATATACCTGGGGATTTTAT |
| 96 | AATAAAATCCCCAGGTATATGAGTT | | 542 | AACTCATATACCTGGGGATTTTATT |
| 97 | TAATAAAATCCCCAGGTATATGAGT | | 543 | ACTCATATACCTGGGGATTTTATTA |
| 98 | GTAATAAAATCCCCAGGTATATGAG | | 544 | CTCATATACCTGGGGATTTTATTAC |
| 99 | AGTAATAAAATCCCCAGGTATATGA | | 545 | TCATATACCTGGGGATTTTATTACT |
| 100 | GAGTAATAAAATCCCCAGGTATATG | | 546 | CATATACCTGGGGATTTTATTACTC |
| 101 | AGAGTAATAAAATCCCCAGGTATAT | | 547 | ATATACCTGGGGATTTTATTACTCT |
| 102 | CAGAGTAATAAAATCCCCAGGTATA | | 548 | TATACCTGGGGATTTTATTACTCTG |
| 103 | CCAGAGTAATAAAATCCCCAGGTAT | | 549 | ATACCTGGGGATTTTATTACTCTGG |
| 104 | CCCAGAGTAATAAAATCCCCAGGTA | | 550 | TACCTGGGGATTTTATTACTCTGGG |
| 105 | TCCCAGAGTAATAAAATCCCCAGGT | | 551 | ACCTGGGGATTTTATTACTCTGGGA |
| 106 | TTCCCAGAGTAATAAAATCCCCAGG | | 552 | CCTGGGGATTTTATTACTCTGGGAA |
| 107 | ATTCCCAGAGTAATAAAATCCCCAG | | 553 | CTGGGGATTTTATTACTCTGGGAAT |
| 108 | AATTCCCAGAGTAATAAAATCCCCA | | 554 | TGGGGATTTTATTACTCTGGGAATT |
| 109 | TAATTCCCAGAGTAATAAAATCCCC | | 555 | GGGGATTTTATTACTCTGGGAATTA |
| 110 | ATAATTCCCAGAGTAATAAAATCCC | | 556 | GGGATTTTATTACTCTGGGAATTAT |
| ill | CATAATTCCCAGAGTAATAAAATCC | | 557 | GGATTTTATTACTCTGGGAATTATG |
| 112 | ACATAATTCCCAGAGTAATAAAATC | | 558 | GATTTTATTACTCTGGGAATTATGT |
| 113 | CACATAATTCCCAGAGTAATAAAAT | | 559 | ATTTTATTACTCTGGGAATTATGTG |
| 114 | ACACATAATTCCCAGAGTAATAAAA | | 560 | TTTTATTACTCTGGGAATTATGTGT |
| 115 | AACACATAATTCCCAGAGTAATAAA | | 561 | TTTATTACTCTGGGAATTATGTGTT |
| 116 | GAACACATAATTCCCAGAGTAATAA | | 562 | TTATTACTCTGGGAATTATGTGTTC |
| 117 | AGAACACATAATTCCCAGAGTAATA | | 563 | TATTACTCTGGGAATTATGTGTTCT |
| 118 | CAGAACACATAATTCCCAGAGTAAT | | 564 | ATTACTCTGGGAATTATGTGTTCTG |
| 119 | GCAGAACACATAATTCCCAGAGTAA | | 565 | TTACTCTGGGAATTATGTGTTCTGC |
| 120 | GGCAGAACACATAATTCCCAGAGTA | | 566 | TACTCTGGGAATTATGTGTTCTGCC |
| 121 | GGGCAGAACACATAATTCCCAGAGT | | 567 | ACTCTGGGAATTATGTGTTCTGCCC |
| 122 | GGGGCAGAACACATAATTCCCAGAG | | 568 | CTCTGGGAATTATGTGTTCTGCCCC |
| 123 | TGGGGCAGAACACATAATTCCCAGA | | 569 | TCTGGGAATTATGTGTTCTGCCCCA |
| 124 | ATGGGGCAGAACACATAATTCCCAG | | 570 | CTGGGAATTATGTGTTCTGCCCCAT |
| 125 | GATGGGGCAGAACACATAATTCCCA | | 571 | TGGGAATTATGTGTTCTGCCCCATC |
| 126 | TGATGGGGCAGAACACATAATTCCC | | 572 | GGGAATTATGTGTTCTGCCCCATCA |
| 127 | GTGATGGGGCAGAACACATAATTCC | | 573 | GGAATTATGTGTTCTGCCCCATCAC |
| 128 | AGTGATGGGGCAGAACACATAATTC | | 574 | GAATTATGTGTTCTGCCCCATCACT |
| 129 | GAGTGATGGGGCAGAACACATAATT | Branch | 575 | AATTATGTGTTCTGCCCCATCACTC |
| | | point 3 | | |
| 130 | AGAGTGATGGGGCAGAACACATAAT | Branch | 576 | ATTATGTGTTCTGCCCCATCACTCT |
| | | point 3 | | |
| 131 | GAGAGTGATGGGGCAGAACACATAA | Branch | 577 | TTATGTGTTCTGCCCCATCACTCTC |
| | | point 3 | | |
| 132 | AGAGAGTGATGGGGCAGAACACATA | Branch | 578 | TATGTGTTCTGCCCCATCACTCTCT |
| | | point 3 | | |
| 133 | GAGAGAGTGATGGGGCAGAACACAT | Branch | 579 | ATGTGTTCTGCCCCATCACTCTCTC |
| | | point 3 | | |
| 134 | AGAGAGAGTGATGGGGCAGAACACA | Branch | 580 | TGTGTTCTGCCCCATCACTCTCTCT |
| | | point 3 | | |
| 135 | AAGAGAGAGTGATGGGGCAGAACAC | Branch | 581 | GTGTTCTGCCCCATCACTCTCTCTT |
| | | point 3 | | |
| 136 | TAAGAGAGAGTGATGGGGCAGAACA | Branch | 582 | TGTTCTGCCCCATCACTCTCTCTTA |
| | | point 3 | | |
| 137 | TTAAGAGAGAGTGATGGGGCAGAAC | Branch | 583 | GTTCTGCCCCATCACTCTCTCTTAA |
| | | point 3 | | |
| 138 | ATTAAGAGAGAGTGATGGGGCAGAA | Branch | 584 | TTCTGCCCCATCACTCTCTCTTAAT |
| | | point 3 | | |
| 139 | AATTAAGAGAGAGTGATGGGGCAGA | Branch | 585 | TCTGCCCCATCACTCTCTCTTAATT |
| | | point 3 | | |
| 140 | CAATTAAGAGAGAGTGATGGGGCAG | Branch | 586 | CTGCCCCATCACTCTCTCTTAATTG |
| | | point 3 | | |
| 141 | CCAATTAAGAGAGAGTGATGGGGCA | Branch | 587 | TGCCCCATCACTCTCTCTTAATTGG |
| | | point 3 | | |
| 142 | TCCAATTAAGAGAGAGTGATGGGGC | Branch | 588 | GCCCCATCACTCTCTCTTAATTGGA |
| | | point 3 | | |
| 143 | ATCCAATTAAGAGAGAGTGATGGGG | Branch | 589 | CCCCATCACTCTCTCTTAATTGGAT |
| | | point 3 | | |
| 144 | AATCCAATTAAGAGAGAGTGATGGG | Branch | 590 | CCCATCACTCTCTCTTAATTGGATT |
| | | point 3 | | |
| 145 | AAATCCAATTAAGAGAGAGTGATGG | Branch | 591 | CCATCACTCTCTCTTAATTGGATTT |
| | | point 3 | | |
| 146 | AAAATCCAATTAAGAGAGAGTGATG | | 592 | CATCACTCTCTCTTAATTGGATTTT |
| 147 | AAAAATCCAATTAAGAGAGAGTGAT | | 593 | ATCACTCTCTCTTAATTGGATTTTT |
| 148 | TAAAAATCCAATTAAGAGAGAGTGA | | 594 | TCACTCTCTCTTAATTGGATTTTTA |
| 149 | TTAAAAATCCAATTAAGAGAGAGTG | | 595 | CACTCTCTCTTAATTGGATTTTTAA |
| 150 | TTTAAAAATCCAATTAAGAGAGAGT | | 596 | ACTCTCTCTTAATTGGATTTTTAAA |
| 151 | TTTTAAAAATCCAATTAAGAGAGAG | | 597 | CTCTCTCTTAATTGGATTTTTAAAA |
| 152 | ATTTTAAAAATCCAATTAAGAGAGA | | 598 | TCTCTCTTAATTGGATTTTTAAAAT |
| 153 | AATTTTAAAAATCCAATTAAGAGAG | | 599 | CTCTCTTAATTGGATTTTTAAAATT |
| 154 | TAATTTTAAAAATCCAATTAAGAGA | | 600 | TCTCTTAATTGGATTTTTAAAATTA |
| 155 | ATAATTTTAAAAATCCAATTAAGAG | | 601 | CTCTTAATTGGATTTTTAAAATTAT |
| 156 | TATAATTTTAAAAATCCAATTAAGA | | 602 | TCTTAATTGGATTTTTAAAATTATA |
| 157 | ATATAATTTTAAAAATCCAATTAAG | | 603 | CTTAATTGGATTTTTAAAATTATAT |
| 158 | AATATAATTTTAAAAATCCAATTAA | | 604 | TTAATTGGATTTTTAAAATTATATT |
| 159 | GAATATAATTTTAAAAATCCAATTA | | 605 | TAATTGGATTTTTAAAATTATATTC |
| 160 | TGAATATAATTTTAAAAATCCAATT | | 606 | AATTGGATTTTTAAAATTATATTCA |
| 161 | ATGAATATAATTTTAAAAATCCAAT | | 607 | ATTGGATTTTTAAAATTATATTCAT |
| 162 | TATGAATATAATTTTAAAAATCCAA | | 608 | TTGGATTTTTAAAATTATATTCATA |
| 163 | ATATGAATATAATTTTAAAAATCCA | | 609 | TGGATTTTTAAAATTATATTCATAT |
| 164 | AATATGAATATAATTTTAAAAATCC | | 610 | GGATTTTTAAAATTATATTCATATT |
| 165 | CAATATGAATATAATTTTAAAAATC | | 611 | GATTTTTAAAATTATATTCATATTG |
| 166 | GCAATATGAATATAATTTTAAAAAT | | 612 | ATTTTTAAAATTATATTCATATTGC |
| 167 | TGCAATATGAATATAATTTTAAAAA | | 613 | TTTTTAAAATTATATTCATATTGCA |
| 168 | CTGCAATATGAATATAATTTTAAAA | | 614 | TTTTAAAATTATATTCATATTGCAG |
| 169 | CCTGCAATATGAATATAATTTTAAA | | 615 | TTTAAAATTATATTCATATTGCAGG |
| 170 | TCCTGCAATATGAATATAATTTTAA | | 616 | TTAAAATTATATTCATATTGCAGGA |
| 171 | GTCCTGCAATATGAATATAATTTTA | Acceptor | 617 | TAAAATTATATTCATATTGCAGGAC |
| | | site | | |
| 172 | AGTCCTGCAATATGAATATAATTTT | Acceptor | 618 | AAAATTATATTCATATTGCAGGACT |
| | | site | | |
| 173 | GAGTCCTGCAATATGAATATAATTT | Acceptor | 619 | AAATTATATTCATATTGCAGGACTC |
| | | site | | |
| 174 | CGAGTCCTGCAATATGAATATAATT | Acceptor | 620 | AATTATATTCATATTGCAGGACTCG |
| | | site | | |
| 175 | CCGAGTCCTGCAATATGAATATAAT | Acceptor | 621 | ATTATATTCATATTGCAGGACTCGG |
| | | site | | |
| 176 | GCCGAGTCCTGCAATATGAATATAA | Acceptor | 622 | TTATATTCATATTGCAGGACTCGGC |
| | | site | | |
| 177 | TGCCGAGTCCTGCAATATGAATATA | Acceptor | 623 | TATATTCATATTGCAGGACTCGGCA |
| | | site | | |
| 178 | CTGCCGAGTCCTGCAATATGAATAT | Acceptor | 624 | ATATTCATATTGCAGGACTCGGCAG |
| | | site | | |
| 179 | TCTGCCGAGTCCTGCAATATGAATA | Acceptor | 625 | TATTCATATTGCAGGACTCGGCAGA |
| | | site | | |
| 180 | TTCTGCCGAGTCCTGCAATATGAAT | Acceptor | 626 | ATTCATATTGCAGGACTCGGCAGAA |
| | | site | | |
| 181 | CTTCTGCCGAGTCCTGCAATATGAA | Acceptor | 627 | TTCATATTGCAGGACTCGGCAGAAG |
| | | site | | |
| 182 | TCTTCTGCCGAGTCCTGCAATATGA | Acceptor | 628 | TCATATTGCAGGACTCGGCAGAAGA |
| | | site | | |
| 183 | GTCTTCTGCCGAGTCCTGCAATATG | Acceptor | 629 | CATATTGCAGGACTCGGCAGAAGAC |
| | | site | | |
| 184 | GGTCTTCTGCCGAGTCCTGCAATAT | Acceptor | 630 | ATATTGCAGGACTCGGCAGAAGACC |
| | | site | | |
| 185 | AGGTCTTCTGCCGAGTCCTGCAATA | Acceptor | 631 | TATTGCAGGACTCGGCAGAAGACCT |
| | | site | | |
| 186 | AAGGTCTTCTGCCGAGTCCTGCAAT | Acceptor | 632 | ATTGCAGGACTCGGCAGAAGACCTT |
| | | site | | |
| 187 | GAAGGTCTTCTGCCGAGTCCTGCAA | Acceptor | 633 | TTGCAGGACTCGGCAGAAGACCTTC |
| | | site | | |
| 188 | CGAAGGTCTTCTGCCGAGTCCTGCA | Acceptor | 634 | TGCAGGACTCGGCAGAAGACCTTCG |
| | | site | | |
| 189 | TCGAAGGTCTTCTGCCGAGTCCTGC | Acceptor | 635 | GCAGGACTCGGCAGAAGACCTTCGA |
| | | site | | |
| 190 | CTCGAAGGTCTTCTGCCGAGTCCTG | Acceptor | 636 | CAGGACTCGGCAGAAGACCTTCGAG |
| | | site | | |
| 191 | TCTCGAAGGTCTTCTGCCGAGTCCT | ESE | 637 | AGGACTCGGCAGAAGACCTTCGAGA |
| | | Binding | | |
| 192 | CTCTCGAAGGTCTTCTGCCGAGTCC | ESE | 638 | GGACTCGGCAGAAGACCTTCGAGAG |
| | | Binding | | |
| 193 | TCTCTCGAAGGTCTTCTGCCGAGTC | ESE | 639 | GACTCGGCAGAAGACCTTCGAGAGA |
| | | Binding | | |
| 194 | TTCTCTCGAAGGTCTTCTGCCGAGT | ESE | 640 | ACTCGGCAGAAGACCTTCGAGAGAA |
| | | Binding | | |
| 195 | TTTCTCTCGAAGGTCTTCTGCCGAG | ESE | 641 | CTCGGCAGAAGACCTTCGAGAGAAA |
| | | Binding | | |
| 196 | CTTTCTCTCGAAGGTCTTCTGCCGA | ESE | 642 | TCGGCAGAAGACCTTCGAGAGAAAG |
| | | Binding | | |
| 197 | CCTTTCTCTCGAAGGTCTTCTGCCG | ESE | 643 | CGGCAGAAGACCTTCGAGAGAAAGG |
| | | Binding | | |
| 198 | ACCTTTCTCTCGAAGGTCTTCTGCC | ESE | 644 | GGCAGAAGACCTTCGAGAGAAAGGT |
| | | Binding | | |
| 199 | TACCTTTCTCTCGAAGGTCTTCTGC | ESE | 645 | GCAGAAGACCTTCGAGAGAAAGGTA |
| | | Binding | | |
| 200 | CTACCTTTCTCTCGAAGGTCTTCTG | ESE | 646 | CAGAAGACCTTCGAGAGAAAGGTAG |
| | | Binding | | |
| 201 | TCTACCTTTCTCTCGAAGGTCTTCT | ESE | 647 | AGAAGACCTTCGAGAGAAAGGTAGA |
| | | Binding | | |
| 202 | TTCTACCTTTCTCTCGAAGGTCTTC | ESE | 648 | GAAGACCTTCGAGAGAAAGGTAGAA |
| | | Binding | | |
| 203 | TTTCTACCTTTCTCTCGAAGGTCTT | ESE | 649 | AAGACCTTCGAGAGAAAGGTAGAAA |
| | | Binding | | |
| 204 | TTTTCTACCTTTCTCTCGAAGGTCT | ESE | 650 | AGACCTTCGAGAGAAAGGTAGAAAA |
| | | Binding | | |
| 205 | ATTTTCTACCTTTCTCTCGAAGGTC | ESE | 651 | GACCTTCGAGAGAAAGGTAGAAAAT |
| | | Binding | | |
| 206 | TATTTTCTACCTTTCTCTCGAAGGT | ESE | 652 | ACCTTCGAGAGAAAGGTAGAAAATA |
| | | Binding | | |
| 207 | TTATTTTCTACCTTTCTCTCGAAGG | ESE | 653 | CCTTCGAGAGAAAGGTAGAAAATAA |
| | | Binding | | |
| 208 | CTTATTTTCTACCTTTCTCTCGAAG | ESE | 654 | CTTCGAGAGAAAGGTAGAAAATAAG |
| | | Binding | | |
| 209 | TCTTATTTTCTACCTTTCTCTCGAA | ESE | 655 | TTCGAGAGAAAGGTAGAAAATAAGA |
| | | Binding | | |
| 210 | TTCTTATTTTCTACCTTTCTCTCGA | ESE | 656 | TCGAGAGAAAGGTAGAAAATAAGAA |
| | | Binding | | |
| 211 | ATTCTTATTTTCTACCTTTCTCTCG | ESE | 657 | CGAGAGAAAGGTAGAAAATAAGAAT |
| | | Binding | | |
| 212 | AATTCTTATTTTCTACCTTTCTCTC | ESE | 658 | GAGAGAAAGGTAGAAAATAAGAATT |
| | | Binding | | |
| 213 | AAATTCTTATTTTCTACCTTTCTCT | ESE | 659 | AGAGAAAGGTAGAAAATAAGAATTT |
| | | Binding | | |
| 214 | CAAATTCTTATTTTCTACCTTTCTC | ESE | 660 | GAGAAAGGTAGAAAATAAGAATTTG |
| | | Binding | | |
| 215 | CCAAATTCTTATTTTCTACCTTTCT | ESE | 661 | AGAAAGGTAGAAAATAAGAATTTGG |
| | | Binding | | |
| 216 | GCCAAATTCTTATTTTCTACCTTTC | ESE | 662 | GAAAGGTAGAAAATAAGAATTTGGC |
| | | Binding | | |
| 217 | AGCCAAATTCTTATTTTCTACCTTT | ESE | 663 | AAAGGTAGAAAATAAGAATTTGGCT |
| | | Binding | | |
| 218 | GAGCCAAATTCTTATTTTCTACCTT | ESE | 664 | AAGGTAGAAAATAAGAATTTGGCTC |
| | | Binding | | |
| 219 | AGAGCCAAATTCTTATTTTCTACCT | ESE | 665 | AGGTAGAAAATAAGAATTTGGCTCT |
| | | Binding | | |
| 220 | GAGAGCCAAATTCTTATTTTCTACC | ESE | 666 | GGTAGAAAATAAGAATTTGGCTCTC |
| | | Binding | | |
| 221 | AGAGAGCCAAATTCTTATTTTCTAC | ESE | 667 | GTAGAAAATAAGAATTTGGCTCTCT |
| | | Binding | | |
| 222 | CAGAGAGCCAAATTCTTATTTTCTA | | 668 | TAGAAAATAAGAATTTGGCTCTCTG |
| 223 | ACAGAGAGCCAAATTCTTATTTTCT | | 669 | AGAAAATAAGAATTTGGCTCTCTGT |
| 224 | CACAGAGAGCCAAATTCTTATTTTC | | 670 | GAAAATAAGAATTTGGCTCTCTGTG |
| 225 | ACACAGAGAGCCAAATTCTTATTTT | | 671 | AAAATAAGAATTTGGCTCTCTGTGT |
| 226 | CACACAGAGAGCCAAATTCTTATTT | Overlaps | 672 | AAATAAGAATTTGGCTCTCTGTGTG |
| | | TDP-43 | | |
| | | site 1 | | |
| 227 | TCACACAGAGAGCCAAATTCTTATT | Overlaps | 673 | AATAAGAATTTGGCTCTCTGTGTGA |
| | | TDP-43 | | |
| | | site 1 | | |
| 228 | CTCACACAGAGAGCCAAATTCTTAT | Overlaps | 674 | ATAAGAATTTGGCTCTCTGTGTGAG |
| | | TDP-43 | | |
| | | site 1 | | |
| 229 | GCTCACACAGAGAGCCAAATTCTTA | Overlaps | 675 | TAAGAATTTGGCTCTCTGTGTGAGC |
| | | TDP-43 | | |
| | | site 1 | | |
| 230 | TGCTCACACAGAGAGCCAAATTCTT | Overlaps | 676 | AAGAATTTGGCTCTCTGTGTGAGCA |
| | | TDP-43 | | |
| | | site 1 | | |
| 231 | ATGCTCACACAGAGAGCCAAATTCT | Overlaps | 677 | AGAATTTGGCTCTCTGTGTGAGCAT |
| | | TDP-43 | | |
| | | site 1 | | |
| 232 | CATGCTCACACAGAGAGCCAAATTC | Overlaps | 678 | GAATTTGGCTCTCTGTGTGAGCATG |
| | | TDP-43 | | |
| | | site 1 | | |
| 233 | ACATGCTCACACAGAGAGCCAAATT | Overlaps | 679 | AATTTGGCTCTCTGTGTGAGCATGT |
| | | TDP-43 | | |
| | | site 1 | | |
| 234 | CACATGCTCACACAGAGAGCCAAAT | Overlaps | 680 | ATTTGGCTCTCTGTGTGAGCATGTG |
| | | TDP-43 | | |
| | | site 1 | | |
| 235 | ACACATGCTCACACAGAGAGCCAAA | Overlaps | 681 | TTTGGCTCTCTGTGTGAGCATGTGT |
| | | TDP-43 | | |
| | | site 1 | | |
| 236 | CACACATGCTCACACAGAGAGCCAA | Overlaps | 682 | TTGGCTCTCTGTGTGAGCATGTGTG |
| | | TDP-43 | | |
| | | site 1 & | | |
| | | 2 | | |
| 237 | GCACACATGCTCACACAGAGAGCCA | Overlaps | 683 | TGGCTCTCTGTGTGAGCATGTGTGC |
| | | TDP-43 | | |
| | | site 1 & | | |
| | | 2 | | |
| 238 | CGCACACATGCTCACACAGAGAGCC | Overlaps | 684 | GGCTCTCTGTGTGAGCATGTGTGCG |
| | | TDP-43 | | |
| | | site 1 & | | |
| | | 2 | | |
| 239 | ACGCACACATGCTCACACAGAGAGC | Overlaps | 685 | GCTCTCTGTGTGAGCATGTGTGCGT |
| | | TDP-43 | | |
| | | site 1 & | | |
| | | 2 | | |
| 240 | CACGCACACATGCTCACACAGAGAG | Overlaps | 686 | CTCTCTGTGTGAGCATGTGTGCGTG |
| | | TDP-43 | | |
| | | site 1 & | | |
| | | 2 | | |
| 241 | ACACGCACACATGCTCACACAGAGA | Overlaps | 687 | TCTCTGTGTGAGCATGTGTGCGTGT |
| | | TDP-43 | | |
| | | site 1 & | | |
| | | 2 | | |
| 242 | CACACGCACACATGCTCACACAGAG | Overlaps | 688 | CTCTGTGTGAGCATGTGTGCGTGTG |
| | | TDP-43 | | |
| | | site 1 & | | |
| | | 2 | | |
| 243 | ACACACGCACACATGCTCACACAGA | Overlaps | 689 | TCTGTGTGAGCATGTGTGCGTGTGT |
| | | TDP-43 | | |
| | | site 1 & | | |
| | | 2 | | |
| 244 | CACACACGCACACATGCTCACACAG | Overlaps | 690 | CTGTGTGAGCATGTGTGCGTGTGTG |
| | | TDP-43 | | |
| | | site 1 & | | |
| | | 2&3 | | |
| 245 | GCACACACGCACACATGCTCACACA | Overlaps | 691 | TGTGTGAGCATGTGTGCGTGTGTGC |
| | | TDP-43 | | |
| | | site 1 & | | |
| | | 2&3 | | |
| 246 | CGCACACACGCACACATGCTCACAC | Overlaps | 692 | GTGTGAGCATGTGTGCGTGTGTGCG |
| | | TDP-43 | | |
| | | site 2 & | | |
| | | 3 | | |
| 247 | TCGCACACACGCACACATGCTCACA | Overlaps | 693 | TGTGAGCATGTGTGCGTGTGTGCGA |
| | | TDP-43 | | |
| | | site 2 & | | |
| | | 3 | | |
| 248 | CTCGCACACACGCACACATGCTCAC | Overlaps | 694 | GTGAGCATGTGTGCGTGTGTGCGAG |
| | | TDP-43 | | |
| | | site 2 & | | |
| | | 3 | | |
| 249 | TCTCGCACACACGCACACATGCTCA | Overlaps | 695 | TGAGCATGTGTGCGTGTGTGCGAGA |
| | | TDP-43 | | |
| | | site 2 & | | |
| | | 3 | | |
| 250 | CTCTCGCACACACGCACACATGCTC | Overlaps | 696 | GAGCATGTGTGCGTGTGTGCGAGAG |
| | | TDP-43 | | |
| | | site 2 & | | |
| | | 3 | | |
| 251 | TCTCTCGCACACACGCACACATGCT | Overlaps | 697 | AGCATGTGTGCGTGTGTGCGAGAGA |
| | | TDP-43 | | |
| | | site 2 & | | |
| | | 3 | | |
| 252 | CTCTCTCGCACACACGCACACATGC | Overlaps | 698 | GCATGTGTGCGTGTGTGCGAGAGAG |
| | | TDP-43 | | |
| | | site 2 & | | |
| | | 3 | | |
| 253 | TCTCTCTCGCACACACGCACACATG | Overlaps | 699 | CATGTGTGCGTGTGTGCGAGAGAGA |
| | | TDP-43 | | |
| | | site 2 & | | |
| | | 3 | | |
| 254 | CTCTCTCTCGCACACACGCACACAT | Overlaps | 700 | ATGTGTGCGTGTGTGCGAGAGAGAG |
| | | TDP-43 | | |
| | | site 2 & | | |
| | | 3 | | |
| 255 | TCTCTCTCTCGCACACACGCACACA | Overlaps | 701 | TGTGTGCGTGTGTGCGAGAGAGAGA |
| | | TDP-43 | | |
| | | site 2 & | | |
| | | 3 | | |
| 256 | CTCTCTCTCTCGCACACACGCACAC | Overlaps | 702 | GTGTGCGTGTGTGCGAGAGAGAGAG |
| | | TDP-43 | | |
| | | site 3 | | |
| 257 | TCTCTCTCTCTCGCACACACGCACA | Overlaps | 703 | TGTGCGTGTGTGCGAGAGAGAGAGA |
| | | TDP-43 | | |
| | | site 3 | | |
| 258 | GTCTCTCTCTCTCGCACACACGCAC | Overlaps | 704 | GTGCGTGTGTGCGAGAGAGAGAGAC |
| | | TDP-43 | | |
| | | site 3 | | |
| 259 | TGTCTCTCTCTCTCGCACACACGCA | Overlaps | 705 | TGCGTGTGTGCGAGAGAGAGAGACA |
| | | TDP-43 | | |
| | | site 3 | | |
| 260 | CTGTCTCTCTCTCTCGCACACACGC | Overlaps | 706 | GCGTGTGTGCGAGAGAGAGAGACAG |
| | | TDP-43 | | |
| | | site 3 | | |
| 261 | TCTGTCTCTCTCTCTCGCACACACG | Overlaps | 707 | CGTGTGTGCGAGAGAGAGAGACAGA |
| | | TDP-43 | | |
| | | site 3 | | |
| 262 | GTCTGTCTCTCTCTCTCGCACACAC | Overlaps | 708 | GTGTGTGCGAGAGAGAGAGACAGAC |
| | | TDP-43 | | |
| | | site 3 | | |
| 263 | TGTCTGTCTCTCTCTCTCGCACACA | Overlaps | 709 | TGTGTGCGAGAGAGAGAGACAGACA |
| | | TDP-43 | | |
| | | site 3 | | |
| 264 | CTGTCTGTCTCTCTCTCTCGCACAC | | 710 | GTGTGCGAGAGAGAGAGACAGACAG |
| 265 | GCTGTCTGTCTCTCTCTCTCGCACA | | 711 | TGTGCGAGAGAGAGAGACAGACAGC |
| 266 | GGCTGTCTGTCTCTCTCTCTCGCAC | | 712 | GTGCGAGAGAGAGAGACAGACAGCC |
| 267 | AGGCTGTCTGTCTCTCTCTCTCGCA | | 713 | TGCGAGAGAGAGAGACAGACAGCCT |
| 268 | CAGGCTGTCTGTCTCTCTCTCTCGC | | 714 | GCGAGAGAGAGAGACAGACAGCCTG |
| 269 | GCAGGCTGTCTGTCTCTCTCTCTCG | | 715 | CGAGAGAGAGAGACAGACAGCCTGC |
| 270 | GGCAGGCTGTCTGTCTCTCTCTCTC | | 716 | GAGAGAGAGAGACAGACAGCCTGCC |
| 271 | AGGCAGGCTGTCTGTCTCTCTCTCT | | 717 | AGAGAGAGAGACAGACAGCCTGCCT |
| 272 | TAGGCAGGCTGTCTGTCTCTCTCTC | | 718 | GAGAGAGAGACAGACAGCCTGCCTA |
| 273 | TTAGGCAGGCTGTCTGTCTCTCTCT | | 719 | AGAGAGAGACAGACAGCCTGCCTAA |
| 274 | CTTAGGCAGGCTGTCTGTCTCTCTC | | 720 | GAGAGAGACAGACAGCCTGCCTAAG |
| 275 | TCTTAGGCAGGCTGTCTGTCTCTCT | | 721 | AGAGAGACAGACAGCCTGCCTAAGA |
| 276 | TTCTTAGGCAGGCTGTCTGTCTCTC | | 722 | GAGAGACAGACAGCCTGCCTAAGAA |
| 277 | CTTCTTAGGCAGGCTGTCTGTCTCT | | 723 | AGAGACAGACAGCCTGCCTAAGAAG |
| 278 | TCTTCTTAGGCAGGCTGTCTGTCTC | | 724 | GAGACAGACAGCCTGCCTAAGAAGA |
| 279 | TTCTTCTTAGGCAGGCTGTCTGTCT | | 725 | AGACAGACAGCCTGCCTAAGAAGAA |
| 280 | TTTCTTCTTAGGCAGGCTGTCTGTC | | 726 | GACAGACAGCCTGCCTAAGAAGAAA |
| 281 | ATTTCTTCTTAGGCAGGCTGTCTGT | | 727 | ACAGACAGCCTGCCTAAGAAGAAAT |
| 282 | CATTTCTTCTTAGGCAGGCTGTCTG | | 728 | CAGACAGCCTGCCTAAGAAGAAATG |
| 283 | TCATTTCTTCTTAGGCAGGCTGTCT | | 729 | AGACAGCCTGCCTAAGAAGAAATGA |
| 284 | TTCATTTCTTCTTAGGCAGGCTGTC | | 730 | GACAGCCTGCCTAAGAAGAAATGAA |
| 285 | ATTCATTTCTTCTTAGGCAGGCTGT | | 731 | ACAGCCTGCCTAAGAAGAAATGAAT |
| 286 | CATTCATTTCTTCTTAGGCAGGCTG | | 732 | CAGCCTGCCTAAGAAGAAATGAATG |
| 287 | ACATTCATTTCTTCTTAGGCAGGCT | | 733 | AGCCTGCCTAAGAAGAAATGAATGT |
| 288 | CACATTCATTTCTTCTTAGGCAGGC | | 734 | GCCTGCCTAAGAAGAAATGAATGTG |
| 289 | TCACATTCATTTCTTCTTAGGCAGG | | 735 | CCTGCCTAAGAAGAAATGAATGTGA |
| 290 | TTCACATTCATTTCTTCTTAGGCAG | | 736 | CTGCCTAAGAAGAAATGAATGTGAA |
| 291 | ATTCACATTCATTTCTTCTTAGGCA | | 737 | TGCCTAAGAAGAAATGAATGTGAAT |
| 292 | CATTCACATTCATTTCTTCTTAGGC | | 738 | GCCTAAGAAGAAATGAATGTGAATG |
| 293 | GCATTCACATTCATTTCTTCTTAGG | | 739 | CCTAAGAAGAAATGAATGTGAATGC |
| 294 | CGCATTCACATTCATTTCTTCTTAG | | 740 | CTAAGAAGAAATGAATGTGAATGCG |
| 295 | CCGCATTCACATTCATTTCTTCTTA | | 741 | TAAGAAGAAATGAATGTGAATGCGG |
| 296 | GCCGCATTCACATTCATTTCTTCTT | | 742 | AAGAAGAAATGAATGTGAATGCGGC |
| 297 | AGCCGCATTCACATTCATTTCTTCT | | 743 | AGAAGAAATGAATGTGAATGCGGCT |
| 298 | AAGCCGCATTCACATTCATTTCTTC | | 744 | GAAGAAATGAATGTGAATGCGGCTT |
| 299 | CAAGCCGCATTCACATTCATTTCTT | | 745 | AAGAAATGAATGTGAATGCGGCTTG |
| 300 | ACAAGCCGCATTCACATTCATTTCT | | 746 | AGAAATGAATGTGAATGCGGCTTGT |
| 301 | CACAAGCCGCATTCACATTCATTTC | | 747 | GAAATGAATGTGAATGCGGCTTGTG |
| 302 | CCACAAGCCGCATTCACATTCATTT | | 748 | AAATGAATGTGAATGCGGCTTGTGG |
| 303 | GCCACAAGCCGCATTCACATTCATT | | 749 | AATGAATGTGAATGCGGCTTGTGGC |
| 304 | TGCCACAAGCCGCATTCACATTCAT | | 750 | ATGAATGTGAATGCGGCTTGTGGCA |
| 305 | GTGCCACAAGCCGCATTCACATTCA | | 751 | TGAATGTGAATGCGGCTTGTGGCAC |
| 306 | TGTGCCACAAGCCGCATTCACATTC | | 752 | GAATGTGAATGCGGCTTGTGGCACA |
| 307 | CTGTGCCACAAGCCGCATTCACATT | | 753 | AATGTGAATGCGGCTTGTGGCACAG |
| 308 | ACTGTGCCACAAGCCGCATTCACAT | | 754 | ATGTGAATGCGGCTTGTGGCACAGT |
| 309 | AACTGTGCCACAAGCCGCATTCACA | | 755 | TGTGAATGCGGCTTGTGGCACAGTT |
| 310 | CAACTGTGCCACAAGCCGCATTCAC | | 756 | GTGAATGCGGCTTGTGGCACAGTTG |
| 311 | TCAACTGTGCCACAAGCCGCATTCA | | 757 | TGAATGCGGCTTGTGGCACAGTTGA |
| 312 | GTCAACTGTGCCACAAGCCGCATTC | | 758 | GAATGCGGCTTGTGGCACAGTTGAC |
| 313 | TGTCAACTGTGCCACAAGCCGCATT | | 759 | AATGCGGCTTGTGGCACAGTTGACA |
| 314 | TTGTCAACTGTGCCACAAGCCGCAT | | 760 | ATGCGGCTTGTGGCACAGTTGACAA |
| 315 | CTTGTCAACTGTGCCACAAGCCGCA | | 761 | TGCGGCTTGTGGCACAGTTGACAAG |
| 316 | CCTTGTCAACTGTGCCACAAGCCGC | | 762 | GCGGCTTGTGGCACAGTTGACAAGG |
| 317 | TCCTTGTCAACTGTGCCACAAGCCG | | 763 | CGGCTTGTGGCACAGTTGACAAGGA |
| 318 | ATCCTTGTCAACTGTGCCACAAGCC | | 764 | GGCTTGTGGCACAGTTGACAAGGAT |
| 319 | CATCCTTGTCAACTGTGCCACAAGC | | 765 | GCTTGTGGCACAGTTGACAAGGATG |
| 320 | TCATCCTTGTCAACTGTGCCACAAG | | 766 | CTTGTGGCACAGTTGACAAGGATGA |
| 321 | ATCATCCTTGTCAACTGTGCCACAA | | 767 | TTGTGGCACAGTTGACAAGGATGAT |
| 322 | TATCATCCTTGTCAACTGTGCCACA | | 768 | TGTGGCACAGTTGACAAGGATGATA |
| 323 | TTATCATCCTTGTCAACTGTGCCAC | | 769 | GTGGCACAGTTGACAAGGATGATAA |
| 324 | TTTATCATCCTTGTCAACTGTGCCA | | 770 | TGGCACAGTTGACAAGGATGATAAA |
| 325 | ATTTATCATCCTTGTCAACTGTGCC | | 771 | GGCACAGTTGACAAGGATGATAAAT |
| 326 | GATTTATCATCCTTGTCAACTGTGC | | 772 | GCACAGTTGACAAGGATGATAAATC |
| 327 | TGATTTATCATCCTTGTCAACTGTG | | 773 | CACAGTTGACAAGGATGATAAATCA |
| 328 | TTGATTTATCATCCTTGTCAACTGT | | 774 | ACAGTTGACAAGGATGATAAATCAA |
| 329 | ATTGATTTATCATCCTTGTCAACTG | | 775 | CAGTTGACAAGGATGATAAATCAAT |
| 330 | TATTGATTTATCATCCTTGTCAACT | | 776 | AGTTGACAAGGATGATAAATCAATA |
| 331 | TTATTGATTTATCATCCTTGTCAAC | | 777 | GTTGACAAGGATGATAAATCAATAA |
| 332 | ATTATTGATTTATCATCCTTGTCAA | | 778 | TTGACAAGGATGATAAATCAATAAT |
| 333 | CATTATTGATTTATCATCCTTGTCA | | 779 | TGACAAGGATGATAAATCAATAATG |
| 334 | GCATTATTGATTTATCATCCTTGTC | | 780 | GACAAGGATGATAAATCAATAATGC |
| 335 | TGCATTATTGATTTATCATCCTTGT | | 781 | ACAAGGATGATAAATCAATAATGCA |
| 336 | TTGCATTATTGATTTATCATCCTTG | | 782 | CAAGGATGATAAATCAATAATGCAA |
| 337 | CTTGCATTATTGATTTATCATCCTT | | 783 | AAGGATGATAAATCAATAATGCAAG |
| 338 | GCTTGCATTATTGATTTATCATCCT | | 784 | AGGATGATAAATCAATAATGCAAGC |
| 339 | AGCTTGCATTATTGATTTATCATCC | | 785 | GGATGATAAATCAATAATGCAAGCT |
| 340 | AAGCTTGCATTATTGATTTATCATC | | 786 | GATGATAAATCAATAATGCAAGCTT |
| 341 | TAAGCTTGCATTATTGATTTATCAT | | 787 | ATGATAAATCAATAATGCAAGCTTA |
| 342 | GTAAGCTTGCATTATTGATTTATCA | | 788 | TGATAAATCAATAATGCAAGCTTAC |
| 343 | AGTAAGCTTGCATTATTGATTTATC | | 789 | GATAAATCAATAATGCAAGCTTACT |
| 344 | TAGTAAGCTTGCATTATTGATTTAT | | 790 | ATAAATCAATAATGCAAGCTTACTA |
| 345 | ATAGTAAGCTTGCATTATTGATTTA | | 791 | TAAATCAATAATGCAAGCTTACTAT |
| 346 | GATAGTAAGCTTGCATTATTGATTT | | 792 | AAATCAATAATGCAAGCTTACTATC |
| 347 | TGATAGTAAGCTTGCATTATTGATT | | 793 | AATCAATAATGCAAGCTTACTATCA |
| 348 | ATGATAGTAAGCTTGCATTATTGAT | | 794 | ATCAATAATGCAAGCTTACTATCAT |
| 349 | AATGATAGTAAGCTTGCATTATTGA | | 795 | TCAATAATGCAAGCTTACTATCATT |
| 350 | AAATGATAGTAAGCTTGCATTATTG | | 796 | CAATAATGCAAGCTTACTATCATTT |
| 351 | TAAATGATAGTAAGCTTGCATTATT | | 797 | AATAATGCAAGCTTACTATCATTTA |
| 352 | ATAAATGATAGTAAGCTTGCATTAT | | 798 | ATAATGCAAGCTTACTATCATTTAT |
| 353 | CATAAATGATAGTAAGCTTGCATTA | | 799 | TAATGCAAGCTTACTATCATTTATG |
| 354 | TCATAAATGATAGTAAGCTTGCATT | | 800 | AATGCAAGCTTACTATCATTTATGA |
| 355 | TTCATAAATGATAGTAAGCTTGCAT | | 801 | ATGCAAGCTTACTATCATTTATGAA |
| 356 | ATTCATAAATGATAGTAAGCTTGCA | | 802 | TGCAAGCTTACTATCATTTATGAAT |
| 357 | TATTCATAAATGATAGTAAGCTTGC | | 803 | GCAAGCTTACTATCATTTATGAATA |
| 358 | CTATTCATAAATGATAGTAAGCTTG | | 804 | CAAGCTTACTATCATTTATGAATAG |
| 359 | GCTATTCATAAATGATAGTAAGCTT | | 805 | AAGCTTACTATCATTTATGAATAGC |
| 360 | TGCTATTCATAAATGATAGTAAGCT | | 806 | AGCTTACTATCATTTATGAATAGCA |
| 361 | TTGCTATTCATAAATGATAGTAAGC | | 807 | GCTTACTATCATTTATGAATAGCAA |
| 362 | ATTGCTATTCATAAATGATAGTAAG | | 808 | CTTACTATCATTTATGAATAGCAAT |
| 363 | TATTGCTATTCATAAATGATAGTAA | | 809 | TTACTATCATTTATGAATAGCAATA |
| 364 | GTATTGCTATTCATAAATGATAGTA | | 810 | TACTATCATTTATGAATAGCAATAC |
| 365 | AGTATTGCTATTCATAAATGATAGT | | 811 | ACTATCATTTATGAATAGCAATACT |
| 366 | CAGTATTGCTATTCATAAATGATAG | | 812 | CTATCATTTATGAATAGCAATACTG |
| 367 | TCAGTATTGCTATTCATAAATGATA | | 813 | TATCATTTATGAATAGCAATACTGA |
| 368 | TTCAGTATTGCTATTCATAAATGAT | | 814 | ATCATTTATGAATAGCAATACTGAA |
| 369 | CTTCAGTATTGCTATTCATAAATGA | | 815 | TCATTTATGAATAGCAATACTGAAG |
| 370 | TCTTCAGTATTGCTATTCATAAATG | | 816 | CATTTATGAATAGCAATACTGAAGA |
| 371 | TTCTTCAGTATTGCTATTCATAAAT | | 817 | ATTTATGAATAGCAATACTGAAGAA |
| 372 | TTTCTTCAGTATTGCTATTCATAAA | | 818 | TTTATGAATAGCAATACTGAAGAAA |
| 373 | ATTTCTTCAGTATTGCTATTCATAA | | 819 | TTATGAATAGCAATACTGAAGAAAT |
| 374 | AATTTCTTCAGTATTGCTATTCATA | | 820 | TATGAATAGCAATACTGAAGAAATT |
| 375 | TAATTTCTTCAGTATTGCTATTCAT | | 821 | ATGAATAGCAATACTGAAGAAATTA |
| 376 | TTAATTTCTTCAGTATTGCTATTCA | | 822 | TGAATAGCAATACTGAAGAAATTAA |
| 377 | TTTAATTTCTTCAGTATTGCTATTC | polyA | 823 | GAATAGCAATACTGAAGAAATTAAA |
| | | signal | | |
| 378 | TTTTAATTTCTTCAGTATTGCTATT | polyA | 824 | AATAGCAATACTGAAGAAATTAAAA |
| | | signal | | |
| 379 | GTTTTAATTTCTTCAGTATTGCTAT | polyA | 825 | ATAGCAATACTGAAGAAATTAAAAC |
| | | signal | | |
| 380 | TGTTTTAATTTCTTCAGTATTGCTA | polyA | 826 | TAGCAATACTGAAGAAATTAAAACA |
| | | signal | | |
| 381 | TTGTTTTAATTTCTTCAGTATTGCT | polyA | 827 | AGCAATACTGAAGAAATTAAAACAA |
| | | signal | | |
| 382 | TTTGTTTTAATTTCTTCAGTATTGC | polyA | 828 | GCAATACTGAAGAAATTAAAACAAA |
| | | signal | | |
| 383 | TTTTGTTTTAATTTCTTCAGTATTG | polyA | 829 | CAATACTGAAGAAATTAAAACAAAA |
| | | signal | | |
| 384 | CTTTTGTTTTAATTTCTTCAGTATT | polyA | 830 | AATACTGAAGAAATTAAAACAAAAG |
| | | signal | | |
| 385 | TCTTTTGTTTTAATTTCTTCAGTAT | polyA | 831 | ATACTGAAGAAATTAAAACAAAAGA |
| | | signal | | |
| 386 | ATCTTTTGTTTTAATTTCTTCAGTA | polyA | 832 | TACTGAAGAAATTAAAACAAAAGAT |
| | | signal | | |
| 387 | AATCTTTTGTTTTAATTTCTTCAGT | polyA | 833 | ACTGAAGAAATTAAAACAAAAGATT |
| | | signal | | |
| 388 | CAATCTTTTGTTTTAATTTCTTCAG | polyA | 834 | CTGAAGAAATTAAAACAAAAGATTG |
| | | signal | | |
| 389 | GCAATCTTTTGTTTTAATTTCTTCA | polyA | 835 | TGAAGAAATTAAAACAAAAGATTGC |
| | | signal | | |
| 390 | AGCAATCTTTTGTTTTAATTTCTTC | polyA | 836 | GAAGAAATTAAAACAAAAGATTGCT |
| | | signal | | |
| 391 | CAGCAATCTTTTGTTTTAATTTCTT | polyA | 837 | AAGAAATTAAAACAAAAGATTGCTG |
| | | signal | | |
| 392 | ACAGCAATCTTTTGTTTTAATTTCT | polyA | 838 | AGAAATTAAAACAAAAGATTGCTGT |
| | | signal | | |
| 393 | GACAGCAATCTTTTGTTTTAATTTC | polyA | 839 | GAAATTAAAACAAAAGATTGCTGTC |
| | | signal | | |
| 394 | AGACAGCAATCTTTTGTTTTAATTT | polyA | 840 | AAATTAAAACAAAAGATTGCTGTCT |
| | | signal | | |
| 395 | GAGACAGCAATCTTTTGTTTTAATT | polyA | 841 | AATTAAAACAAAAGATTGCTGTCTC |
| | | signal | | |
| | | and site | | |
| 396 | TGAGACAGCAATCTTTTGTTTTAAT | polyA | 842 | ATTAAAACAAAAGATTGCTGTCTCA |
| | | signal | | |
| | | and site | | |
| 397 | TTGAGACAGCAATCTTTTGTTTTAA | polyA | 843 | TTAAAACAAAAGATTGCTGTCTCAA |
| | | site | | |
| 398 | ATTGAGACAGCAATCTTTTGTTTTA | polyA | 844 | TAAAACAAAAGATTGCTGTCTCAAT |
| | | site | | |
| 399 | TATTGAGACAGCAATCTTTTGTTTT | polyA | 845 | AAAACAAAAGATTGCTGTCTCAATA |
| | | site | | |
| 400 | ATATTGAGACAGCAATCTTTTGTTT | polyA | 846 | AAACAAAAGATTGCTGTCTCAATAT |
| | | site | | |
| 401 | TATATTGAGACAGCAATCTTTTGTT | polyA | 847 | AACAAAAGATTGCTGTCTCAATATA |
| | | site | | |
| 402 | ATATATTGAGACAGCAATCTTTTGT | polyA | 848 | ACAAAAGATTGCTGTCTCAATATAT |
| | | site | | |
| 403 | GATATATTGAGACAGCAATCTTTTG | polyA | 849 | CAAAAGATTGCTGTCTCAATATATC |
| | | site | | |
| 404 | AGATATATTGAGACAGCAATCTTTT | polyA | 850 | AAAAGATTGCTGTCTCAATATATCT |
| | | site | | |
| 405 | AAGATATATTGAGACAGCAATCTTT | polyA | 851 | AAAGATTGCTGTCTCAATATATCTT |
| | | site | | |
| 406 | TAAGATATATTGAGACAGCAATCTT | polyA | 852 | AAGATTGCTGTCTCAATATATCTTA |
| | | site | | |
| 407 | ATAAGATATATTGAGACAGCAATCT | polyA | 853 | AGATTGCTGTCTCAATATATCTTAT |
| | | site | | |
| 408 | TATAAGATATATTGAGACAGCAATC | polyA | 854 | GATTGCTGTCTCAATATATCTTATA |
| | | site | | |
| 409 | ATATAAGATATATTGAGACAGCAAT | polyA | 855 | ATTGCTGTCTCAATATATCTTATAT |
| | | site | | |
| 410 | AATATAAGATATATTGAGACAGCAA | polyA | 856 | TTGCTGTCTCAATATATCTTATATT |
| | | site | | |
| 411 | AAATATAAGATATATTGAGACAGCA | polyA | 857 | TGCTGTCTCAATATATCTTATATTT |
| | | site | | |
| 412 | TAAATATAAGATATATTGAGACAGC | polyA | 858 | GCTGTCTCAATATATCTTATATTTA |
| | | site | | |
| 413 | ATAAATATAAGATATATTGAGACAG | | 859 | CTGTCTCAATATATCTTATATTTAT |
| 414 | AATAAATATAAGATATATTGAGACA | | 860 | TGTCTCAATATATCTTATATTTATT |
| 415 | TAATAAATATAAGATATATTGAGAC | | 861 | GTCTCAATATATCTTATATTTATTA |
| 416 | ATAATAAATATAAGATATATTGAGA | | 862 | TCTCAATATATCTTATATTTATTAT |
| 417 | AATAATAAATATAAGATATATTGAG | | 863 | CTCAATATATCTTATATTTATTATT |
| 418 | AAATAATAAATATAAGATATATTGA | | 864 | TCAATATATCTTATATTTATTATTT |
| 419 | TAAATAATAAATATAAGATATATTG | | 865 | CAATATATCTTATATTTATTATTTA |
| 420 | GTAAATAATAAATATAAGATATATT | | 866 | AATATATCTTATATTTATTATTTAC |
| 421 | GGTAAATAATAAATATAAGATATAT | | 867 | ATATATCTTATATTTATTATTTACC |
| 422 | TGGTAAATAATAAATATAAGATATA | | 868 | TATATCTTATATTTATTATTTACCA |
| 423 | TTGGTAAATAATAAATATAAGATAT | | 869 | ATATCTTATATTTATTATTTACCAA |
| 424 | TTTGGTAAATAATAAATATAAGATA | | 870 | TATCTTATATTTATTATTTACCAAA |
| 425 | ATTTGGTAAATAATAAATATAAGAT | | 871 | ATCTTATATTTATTATTTACCAAAT |
| 426 | AATTTGGTAAATAATAAATATAAGA | | 872 | TCTTATATTTATTATTTACCAAATT |
| 427 | TAATTTGGTAAATAATAAATATAAG | | 873 | CTTATATTTATTATTTACCAAATTA |
| 428 | ATAATTTGGTAAATAATAAATATAA | | 874 | TTATATTTATTATTTACCAAATTAT |
| 429 | AATAATTTGGTAAATAATAAATATA | | 875 | TATATTTATTATTTACCAAATTATT |
| 430 | GAATAATTTGGTAAATAATAAATAT | | 876 | ATATTTATTATTTACCAAATTATTC |
| 431 | AGAATAATTTGGTAAATAATAAATA | | 877 | TATTTATTATTTACCAAATTATTCT |
| 432 | TAGAATAATTTGGTAAATAATAAAT | | 878 | ATTTATTATTTACCAAATTATTCTA |
| 433 | TTAGAATAATTTGGTAAATAATAAA | | 879 | TTTATTATTTACCAAATTATTCTAA |
| 434 | CTTAGAATAATTTGGTAAATAATAA | | 880 | TTATTATTTACCAAATTATTCTAAG |
| 435 | TCTTAGAATAATTTGGTAAATAATA | | 881 | TATTATTTACCAAATTATTCTAAGA |
| 436 | CTCTTAGAATAATTTGGTAAATAAT | | 882 | ATTATTTACCAAATTATTCTAAGAG |
| 437 | ACTCTTAGAATAATTTGGTAAATAA | | 883 | TTATTTACCAAATTATTCTAAGAGT |
| 438 | TACTCTTAGAATAATTTGGTAAATA | | 884 | TATTTACCAAATTATTCTAAGAGTA |
| 439 | ATACTCTTAGAATAATTTGGTAAAT | | 885 | ATTTACCAAATTATTCTAAGAGTAT |
| 440 | AATACTCTTAGAATAATTTGGTAAA | | 886 | TTTACCAAATTATTCTAAGAGTATT |
| 441 | AAATACTCTTAGAATAATTTGGTAA | | 887 | TTACCAAATTATTCTAAGAGTATTT |
| 442 | GAAATACTCTTAGAATAATTTGGTA | | 888 | TACCAAATTATTCTAAGAGTATTTC |
| 443 | AGAAATACTCTTAGAATAATTTGGT | | 889 | ACCAAATTATTCTAAGAGTATTTCT |
| 444 | AAGAAATACTCTTAGAATAATTTGG | | 890 | CCAAATTATTCTAAGAGTATTTCTT |
| 445 | GAAGAAATACTCTTAGAATAATTTG | | 891 | CAAATTATTCTAAGAGTATTTCTTC |
| 446 | GGAAGAAATACTCTTAGAATAATTT | | 892 | AAATTATTCTAAGAGTATTTCTTCC |

*At least one (i.e., one or more) nucleoside linkage of the oligonucleotide sequence is independently selected from a phosphorothioate linkage, an alkyl phosphate linkage, a phosphorodithioate linkage, a phosphotriester linkage, an alkylphosphonate linkage, a 3-methoxypropyl phosphonate linkage, a methylphosphonate linkage, an aminoalkylphosphotriester linkage, an alkylene phosphonate linkage, a phosphinate linkage, a phosphoramidate linkage, a phosphoramidothioate linkage, a thiophosphorodiamidate linkage, a phosphorodiamidate (e.g., comprising a phosphorodiamidate morpholino (PMO), 3′ amino ribose, or 5′ amino ribose) linkage, an aminoalkylphosphoramidate linkage, a thiophosphoramidate linkage, a thionoalkylphosphonate linkage, a thionoalkylphosphotriester linkage, a thiophosphate linkage, a selenophosphate linkage, and a boranophosphate linkage.

[0253] Table 2 below identifies additional STMN2 AON sequences:

TABLE 2
Additional STMN2 AON Sequences (corresponding
to SEQ ID NOs: 1-446 but with thymine bases
replaced with uracil bases)

| SEQ | |
|---|---|
| ID | |
| NO: | AON Sequence* (5’ → 3’) |
| 893 | GGAGGGAUACCUGUAUAUUACAAGU |
| 894 | AGGAGGGAUACCUGUAUAUUACAAG |
| 895 | CAGGAGGGAUACCUGUAUAUUACAA |
| 896 | CCAGGAGGGAUACCUGUAUAUUACA |
| 897 | ACCAGGAGGGAUACCUGUAUAUUAC |
| 898 | UACCAGGAGGGAUACCUGUAUAUUA |
| 899 | UUACCAGGAGGGAUACCUGUAUAUU |
| 900 | CUUACCAGGAGGGAUACCUGUAUAU |
| 901 | GCUUACCAGGAGGGAUACCUGUAUA |
| 902 | AGCUUACCAGGAGGGAUACCUGUAU |
| 903 | GAGCUUACCAGGAGGGAUACCUGUA |
| 904 | AGAGCUUACCAGGAGGGAUACCUGU |
| 905 | CAGAGCUUACCAGGAGGGAUACCUG |
| 906 | CCAGAGCUUACCAGGAGGGAUACCU |
| 907 | ACCAGAGCUUACCAGGAGGGAUACC |
| 908 | UACCAGAGCUUACCAGGAGGGAUAC |
| 909 | AUACCAGAGCUUACCAGGAGGGAUA |
| 910 | AAUACCAGAGCUUACCAGGAGGGAU |
| 911 | UAAUACCAGAGCUUACCAGGAGGGA |
| 912 | AUAAUACCAGAGCUUACCAGGAGGG |
| 913 | CAUAAUACCAGAGCUUACCAGGAGG |
| 914 | ACAUAAUACCAGAGCUUACCAGGAG |
| 915 | GACAUAAUACCAGAGCUUACCAGGA |
| 916 | AGACAUAAUACCAGAGCUUACCAGG |
| 917 | AAGACAUAAUACCAGAGCUUACCAG |
| 918 | UAAGACAUAAUACCAGAGCUUACCA |
| 919 | UUAAGACAUAAUACCAGAGCUUACC |
| 920 | GUUAAGACAUAAUACCAGAGCUUAC |
| 921 | UGUUAAGACAUAAUACCAGAGCUUA |
| 922 | AUGUUAAGACAUAAUACCAGAGCUU |
| 923 | AAUGUUAAGACAUAAUACCAGAGCU |
| 924 | AAAUGUUAAGACAUAAUACCAGAGC |
| 925 | AAAAUGUUAAGACAUAAUACCAGAG |
| 926 | AAAAAUGUUAAGACAUAAUACCAGA |
| 927 | UAAAAAUGUUAAGACAUAAUACCAG |
| 928 | UUAAAAAUGUUAAGACAUAAUACCA |
| 929 | UUUAAAAAUGUUAAGACAUAAUACC |
| 930 | AUUUAAAAAUGUUAAGACAUAAUAC |
| 931 | GAUUUAAAAAUGUUAAGACAUAAUA |
| 932 | AGAUUUAAAAAUGUUAAGACAUAAU |
| 933 | UAGAUUUAAAAAUGUUAAGACAUAA |
| 934 | AUAGAUUUAAAAAUGUUAAGACAUA |
| 935 | CAUAGAUUUAAAAAUGUUAAGACAU |
| 936 | CCAUAGAUUUAAAAAUGUUAAGACA |
| 937 | ACCAUAGAUUUAAAAAUGUUAAGAC |
| 938 | UACCAUAGAUUUAAAAAUGUUAAGA |
| 939 | UUACCAUAGAUUUAAAAAUGUUAAG |
| 940 | AUUACCAUAGAUUUAAAAAUGUUAA |
| 941 | GAUUACCAUAGAUUUAAAAAUGUUA |
| 942 | AGAUUACCAUAGAUUUAAAAAUGUU |
| 943 | AAGAUUACCAUAGAUUUAAAAAUGU |
| 944 | AAAGAUUACCAUAGAUUUAAAAAUG |
| 945 | UAAAGAUUACCAUAGAUUUAAAAAU |
| 946 | GUAAAGAUUACCAUAGAUUUAAAAA |
| 947 | UGUAAAGAUUACCAUAGAUUUAAAA |
| 948 | UUGUAAAGAUUACCAUAGAUUUAAA |
| 949 | UUUGUAAAGAUUACCAUAGAUUUAA |
| 950 | UUUUGUAAAGAUUACCAUAGAUUUA |
| 951 | AUUUUGUAAAGAUUACCAUAGAUUU |
| 952 | UAUUUUGUAAAGAUUACCAUAGAUU |
| 953 | AUAUUUUGUAAAGAUUACCAUAGAU |
| 954 | AAUAUUUUGUAAAGAUUACCAUAGA |
| 955 | AAAUAUUUUGUAAAGAUUACCAUAG |
| 956 | AAAAUAUUUUGUAAAGAUUACCAUA |
| 957 | UAAAAUAUUUUGUAAAGAUUACCAU |
| 958 | GUAAAAUAUUUUGUAAAGAUUACCA |
| 959 | AGUAAAAUAUUUUGUAAAGAUUACC |
| 960 | AAGUAAAAUAUUUUGUAAAGAUUAC |
| 961 | GAAGUAAAAUAUUUUGUAAAGAUUA |
| 962 | GGAAGUAAAAUAUUUUGUAAAGAUU |
| 963 | CGGAAGUAAAAUAUUUUGUAAAGAU |
| 964 | UCGGAAGUAAAAUAUUUUGUAAAGA |
| 965 | UUCGGAAGUAAAAUAUUUUGUAAAG |
| 966 | GUUCGGAAGUAAAAUAUUUUGUAAA |
| 967 | AGUUCGGAAGUAAAAUAUUUUGUAA |
| 968 | GAGUUCGGAAGUAAAAUAUUUUGUA |
| 969 | UGAGUUCGGAAGUAAAAUAUUUUGU |
| 970 | AUGAGUUCGGAAGUAAAAUAUUUUG |
| 971 | UAUGAGUUCGGAAGUAAAAUAUUUU |
| 972 | AUAUGAGUUCGGAAGUAAAAUAUUU |
| 973 | UAUAUGAGUUCGGAAGUAAAAUAUU |
| 974 | GUAUAUGAGUUCGGAAGUAAAAUAU |
| 975 | GGUAUAUGAGUUCGGAAGUAAAAUA |
| 976 | AGGUAUAUGAGUUCGGAAGUAAAAU |
| 977 | CAGGUAUAUGAGUUCGGAAGUAAAA |
| 978 | CCAGGUAUAUGAGUUCGGAAGUAAA |
| 979 | CCCAGGUAUAUGAGUUCGGAAGUAA |
| 980 | CCCCAGGUAUAUGAGUUCGGAAGUA |
| 981 | UCCCCAGGUAUAUGAGUUCGGAAGU |
| 982 | AUCCCCAGGUAUAUGAGUUCGGAAG |
| 983 | AAUCCCCAGGUAUAUGAGUUCGGAA |
| 984 | AAAUCCCCAGGUAUAUGAGUUCGGA |
| 985 | AAAAUCCCCAGGUAUAUGAGUUCGG |
| 986 | UAAAAUCCCCAGGUAUAUGAGUUCG |
| 987 | AUAAAAUCCCCAGGUAUAUGAGUUC |
| 988 | AAUAAAAUCCCCAGGUAUAUGAGUU |
| 989 | UAAUAAAAUCCCCAGGUAUAUGAGU |
| 990 | GUAAUAAAAUCCCCAGGUAUAUGAG |
| 991 | AGUAAUAAAAUCCCCAGGUAUAUGA |
| 992 | GAGUAAUAAAAUCCCCAGGUAUAUG |
| 993 | AGAGUAAUAAAAUCCCCAGGUAUAU |
| 994 | CAGAGUAAUAAAAUCCCCAGGUAUA |
| 995 | CCAGAGUAAUAAAAUCCCCAGGUAU |
| 996 | CCCAGAGUAAUAAAAUCCCCAGGUA |
| 997 | UCCCAGAGUAAUAAAAUCCCCAGGU |
| 998 | UUCCCAGAGUAAUAAAAUCCCCAGG |
| 999 | AUUCCCAGAGUAAUAAAAUCCCCAG |
| 1000 | AAUUCCCAGAGUAAUAAAAUCCCCA |
| 1001 | UAAUUCCCAGAGUAAUAAAAUCCCC |
| 1002 | AUAAUUCCCAGAGUAAUAAAAUCCC |
| 1003 | CAUAAUUCCCAGAGUAAUAAAAUCC |
| 1004 | ACAUAAUUCCCAGAGUAAUAAAAUC |
| 1005 | CACAUAAUUCCCAGAGUAAUAAAAU |
| 1006 | ACACAUAAUUCCCAGAGUAAUAAAA |
| 1007 | AACACAUAAUUCCCAGAGUAAUAAA |
| 1008 | GAACACAUAAUUCCCAGAGUAAUAA |
| 1009 | AGAACACAUAAUUCCCAGAGUAAUA |
| 1010 | CAGAACACAUAAUUCCCAGAGUAAU |
| 1011 | GCAGAACACAUAAUUCCCAGAGUAA |
| 1012 | GGCAGAACACAUAAUUCCCAGAGUA |
| 1013 | GGGCAGAACACAUAAUUCCCAGAGU |
| 1014 | GGGGCAGAACACAUAAUUCCCAGAG |
| 1015 | UGGGGCAGAACACAUAAUUCCCAGA |
| 1016 | AUGGGGCAGAACACAUAAUUCCCAG |
| 1017 | GAUGGGGCAGAACACAUAAUUCCCA |
| 1018 | UGAUGGGGCAGAACACAUAAUUCCC |
| 1019 | GUGAUGGGGCAGAACACAUAAUUCC |
| 1020 | AGUGAUGGGGCAGAACACAUAAUUC |
| 1021 | GAGUGAUGGGGCAGAACACAUAAUU |
| 1022 | AGAGUGAUGGGGCAGAACACAUAAU |
| 1023 | GAGAGUGAUGGGGCAGAACACAUAA |
| 1024 | AGAGAGUGAUGGGGCAGAACACAUA |
| 1025 | GAGAGAGUGAUGGGGCAGAACACAU |
| 1026 | AGAGAGAGUGAUGGGGCAGAACACA |
| 1027 | AAGAGAGAGUGAUGGGGCAGAACAC |
| 1028 | UAAGAGAGAGUGAUGGGGCAGAACA |
| 1029 | UUAAGAGAGAGUGAUGGGGCAGAAC |
| 1030 | AUUAAGAGAGAGUGAUGGGGCAGAA |
| 1031 | AAUUAAGAGAGAGUGAUGGGGCAGA |
| 1032 | CAAUUAAGAGAGAGUGAUGGGGCAG |
| 1033 | CCAAUUAAGAGAGAGUGAUGGGGCA |
| 1034 | UCCAAUUAAGAGAGAGUGAUGGGGC |
| 1035 | AUCCAAUUAAGAGAGAGUGAUGGGG |
| 1036 | AAUCCAAUUAAGAGAGAGUGAUGGG |
| 1037 | AAAUCCAAUUAAGAGAGAGUGAUGG |
| 1038 | AAAAUCCAAUUAAGAGAGAGUGAUG |
| 1039 | AAAAAUCCAAUUAAGAGAGAGUGAU |
| 1040 | UAAAAAUCCAAUUAAGAGAGAGUGA |
| 1041 | UUAAAAAUCCAAUUAAGAGAGAGUG |
| 1042 | UUUAAAAAUCCAAUUAAGAGAGAGU |
| 1043 | UUUUAAAAAUCCAAUUAAGAGAGAG |
| 1044 | AUUUUAAAAAUCCAAUUAAGAGAGA |
| 1045 | AAUUUUAAAAAUCCAAUUAAGAGAG |
| 1046 | UAAUUUUAAAAAUCCAAUUAAGAGA |
| 1047 | AUAAUUUUAAAAAUCCAAUUAAGAG |
| 1048 | UAUAAUUUUAAAAAUCCAAUUAAGA |
| 1049 | AUAUAAUUUUAAAAAUCCAAUUAAG |
| 1050 | AAUAUAAUUUUAAAAAUCCAAUUAA |
| 1051 | GAAUAUAAUUUUAAAAAUCCAAUUA |
| 1052 | UGAAUAUAAUUUUAAAAAUCCAAUU |
| 1053 | AUGAAUAUAAUUUUAAAAAUCCAAU |
| 1054 | UAUGAAUAUAAUUUUAAAAAUCCAA |
| 1055 | AUAUGAAUAUAAUUUUAAAAAUCCA |
| 1056 | AAUAUGAAUAUAAUUUUAAAAAUCC |
| 1057 | CAAUAUGAAUAUAAUUUUAAAAAUC |
| 1058 | GCAAUAUGAAUAUAAUUUUAAAAAU |
| 1059 | UGCAAUAUGAAUAUAAUUUUAAAAA |
| 1060 | CUGCAAUAUGAAUAUAAUUUUAAAA |
| 1061 | CCUGCAAUAUGAAUAUAAUUUUAAA |
| 1062 | UCCUGCAAUAUGAAUAUAAUUUUAA |
| 1063 | GUCCUGCAAUAUGAAUAUAAUUUUA |
| 1064 | AGUCCUGCAAUAUGAAUAUAAUUUU |
| 1065 | GAGUCCUGCAAUAUGAAUAUAAUUU |
| 1066 | CGAGUCCUGCAAUAUGAAUAUAAUU |
| 1067 | CCGAGUCCUGCAAUAUGAAUAUAAU |
| 1068 | GCCGAGUCCUGCAAUAUGAAUAUAA |
| 1069 | UGCCGAGUCCUGCAAUAUGAAUAUA |
| 1070 | CUGCCGAGUCCUGCAAUAUGAAUAU |
| 1071 | UCUGCCGAGUCCUGCAAUAUGAAUA |
| 1072 | UUCUGCCGAGUCCUGCAAUAUGAAU |
| 1073 | CUUCUGCCGAGUCCUGCAAUAUGAA |
| 1074 | UCUUCUGCCGAGUCCUGCAAUAUGA |
| 1075 | GUCUUCUGCCGAGUCCUGCAAUAUG |
| 1076 | GGUCUUCUGCCGAGUCCUGCAAUAU |
| 1077 | AGGUCUUCUGCCGAGUCCUGCAAUA |
| 1078 | AAGGUCUUCUGCCGAGUCCUGCAAU |
| 1079 | GAAGGUCUUCUGCCGAGUCCUGCAA |
| 1080 | CGAAGGUCUUCUGCCGAGUCCUGCA |
| 1081 | UCGAAGGUCUUCUGCCGAGUCCUGC |
| 1082 | CUCGAAGGUCUUCUGCCGAGUCCUG |
| 1083 | UCUCGAAGGUCUUCUGCCGAGUCCU |
| 1084 | CUCUCGAAGGUCUUCUGCCGAGUCC |
| 1085 | UCUCUCGAAGGUCUUCUGCCGAGUC |
| 1086 | UUCUCUCGAAGGUCUUCUGCCGAGU |
| 1087 | UUUCUCUCGAAGGUCUUCUGCCGAG |
| 1088 | CUUUCUCUCGAAGGUCUUCUGCCGA |
| 1089 | CCUUUCUCUCGAAGGUCUUCUGCCG |
| 1090 | ACCUUUCUCUCGAAGGUCUUCUGCC |
| 1091 | UACCUUUCUCUCGAAGGUCUUCUGC |
| 1092 | CUACCUUUCUCUCGAAGGUCUUCUG |
| 1093 | UCUACCUUUCUCUCGAAGGUCUUCU |
| 1094 | UUCUACCUUUCUCUCGAAGGUCUUC |
| 1095 | UUUCUACCUUUCUCUCGAAGGUCUU |
| 1096 | UUUUCUACCUUUCUCUCGAAGGUCU |
| 1097 | AUUUUCUACCUUUCUCUCGAAGGUC |
| 1098 | UAUUUUCUACCUUUCUCUCGAAGGU |
| 1099 | UUAUUUUCUACCUUUCUCUCGAAGG |
| 1100 | CUUAUUUUCUACCUUUCUCUCGAAG |
| 1101 | UCUUAUUUUCUACCUUUCUCUCGAA |
| 1102 | UUCUUAUUUUCUACCUUUCUCUCGA |
| 1103 | AUUCUUAUUUUCUACCUUUCUCUCG |
| 1104 | AAUUCUUAUUUUCUACCUUUCUCUC |
| 1105 | AAAUUCUUAUUUUCUACCUUUCUCU |
| 1106 | CAAAUUCUUAUUUUCUACCUUUCUC |
| 1107 | CCAAAUUCUUAUUUUCUACCUUUCU |
| 1108 | GCCAAAUUCUUAUUUUCUACCUUUC |
| 1109 | AGCCAAAUUCUUAUUUUCUACCUUU |
| 1110 | GAGCCAAAUUCUUAUUUUCUACCUU |
| 1111 | AGAGCCAAAUUCUUAUUUUCUACCU |
| 1112 | GAGAGCCAAAUUCUUAUUUUCUACC |
| 1113 | AGAGAGCCAAAUUCUUAUUUUCUAC |
| 1114 | CAGAGAGCCAAAUUCUUAUUUUCUA |
| 1115 | ACAGAGAGCCAAAUUCUUAUUUUCU |
| 1116 | CACAGAGAGCCAAAUUCUUAUUUUC |
| 1117 | ACACAGAGAGCCAAAUUCUUAUUUU |
| 1118 | CACACAGAGAGCCAAAUUCUUAUUU |
| 1119 | UCACACAGAGAGCCAAAUUCUUAUU |
| 1120 | CUCACACAGAGAGCCAAAUUCUUAU |
| 1121 | GCUCACACAGAGAGCCAAAUUCUUA |
| 1122 | UGCUCACACAGAGAGCCAAAUUCUU |
| 1123 | AUGCUCACACAGAGAGCCAAAUUCU |
| 1124 | CAUGCUCACACAGAGAGCCAAAUUC |
| 1125 | ACAUGCUCACACAGAGAGCCAAAUU |
| 1126 | CACAUGCUCACACAGAGAGCCAAAU |
| 1127 | ACACAUGCUCACACAGAGAGCCAAA |
| 1128 | CACACAUGCUCACACAGAGAGCCAA |
| 1129 | GCACACAUGCUCACACAGAGAGCCA |
| 1130 | CGCACACAUGCUCACACAGAGAGCC |
| 1131 | ACGCACACAUGCUCACACAGAGAGC |
| 1132 | CACGCACACAUGCUCACACAGAGAG |
| 1133 | ACACGCACACAUGCUCACACAGAGA |
| 1134 | CACACGCACACAUGCUCACACAGAG |
| 1135 | ACACACGCACACAUGCUCACACAGA |
| 1136 | CACACACGCACACAUGCUCACACAG |
| 1137 | GCACACACGCACACAUGCUCACACA |
| 1138 | CGCACACACGCACACAUGCUCACAC |
| 1139 | UCGCACACACGCACACAUGCUCACA |
| 1140 | CUCGCACACACGCACACAUGCUCAC |
| 1141 | UCUCGCACACACGCACACAUGCUCA |
| 1142 | CUCUCGCACACACGCACACAUGCUC |
| 1143 | UCUCUCGCACACACGCACACAUGCU |
| 1144 | CUCUCUCGCACACACGCACACAUGC |
| 1145 | UCUCUCUCGCACACACGCACACAUG |
| 1146 | CUCUCUCUCGCACACACGCACACAU |
| 1147 | UCUCUCUCUCGCACACACGCACACA |
| 1148 | CUCUCUCUCUCGCACACACGCACAC |
| 1149 | UCUCUCUCUCUCGCACACACGCACA |
| 1150 | GUCUCUCUCUCUCGCACACACGCAC |
| 1151 | UGUCUCUCUCUCUCGCACACACGCA |
| 1152 | CUGUCUCUCUCUCUCGCACACACGC |
| 1153 | UCUGUCUCUCUCUCUCGCACACACG |
| 1154 | GUCUGUCUCUCUCUCUCGCACACAC |
| 1155 | UGUCUGUCUCUCUCUCUCGCACACA |
| 1156 | CUGUCUGUCUCUCUCUCUCGCACAC |
| 1157 | GCUGUCUGUCUCUCUCUCUCGCACA |
| 1158 | GGCUGUCUGUCUCUCUCUCUCGCAC |
| 1159 | AGGCUGUCUGUCUCUCUCUCUCGCA |
| 1160 | CAGGCUGUCUGUCUCUCUCUCUCGC |
| 1161 | GCAGGCUGUCUGUCUCUCUCUCUCG |
| 1162 | GGCAGGCUGUCUGUCUCUCUCUCUC |
| 1163 | AGGCAGGCUGUCUGUCUCUCUCUCU |
| 1164 | UAGGCAGGCUGUCUGUCUCUCUCUC |
| 1165 | UUAGGCAGGCUGUCUGUCUCUCUCU |
| 1166 | CUUAGGCAGGCUGUCUGUCUCUCUC |
| 1167 | UCUUAGGCAGGCUGUCUGUCUCUCU |
| 1168 | UUCUUAGGCAGGCUGUCUGUCUCUC |
| 1169 | CUUCUUAGGCAGGCUGUCUGUCUCU |
| 1170 | UCUUCUUAGGCAGGCUGUCUGUCUC |
| 1171 | UUCUUCUUAGGCAGGCUGUCUGUCU |
| 1172 | UUUCUUCUUAGGCAGGCUGUCUGUC |
| 1173 | AUUUCUUCUUAGGCAGGCUGUCUGU |
| 1174 | CAUUUCUUCUUAGGCAGGCUGUCUG |
| 1175 | UCAUUUCUUCUUAGGCAGGCUGUCU |
| 1176 | UUCAUUUCUUCUUAGGCAGGCUGUC |
| 1177 | AUUCAUUUCUUCUUAGGCAGGCUGU |
| 1178 | CAUUCAUUUCUUCUUAGGCAGGCUG |
| 1179 | ACAUUCAUUUCUUCUUAGGCAGGCU |
| 1180 | CACAUUCAUUUCUUCUUAGGCAGGC |
| 1181 | UCACAUUCAUUUCUUCUUAGGCAGG |
| 1182 | UUCACAUUCAUUUCUUCUUAGGCAG |
| 1183 | AUUCACAUUCAUUUCUUCUUAGGCA |
| 1184 | CAUUCACAUUCAUUUCUUCUUAGGC |
| 1185 | GCAUUCACAUUCAUUUCUUCUUAGG |
| 1186 | CGCAUUCACAUUCAUUUCUUCUUAG |
| 1187 | CCGCAUUCACAUUCAUUUCUUCUUA |
| 1188 | GCCGCAUUCACAUUCAUUUCUUCUU |
| 1189 | AGCCGCAUUCACAUUCAUUUCUUCU |
| 1190 | AAGCCGCAUUCACAUUCAUUUCUUC |
| 1191 | CAAGCCGCAUUCACAUUCAUUUCUU |
| 1192 | ACAAGCCGCAUUCACAUUCAUUUCU |
| 1193 | CACAAGCCGCAUUCACAUUCAUUUC |
| 1194 | CCACAAGCCGCAUUCACAUUCAUUU |
| 1195 | GCCACAAGCCGCAUUCACAUUCAUU |
| 1196 | UGCCACAAGCCGCAUUCACAUUCAU |
| 1197 | GUGCCACAAGCCGCAUUCACAUUCA |
| 1198 | UGUGCCACAAGCCGCAUUCACAUUC |
| 1199 | CUGUGCCACAAGCCGCAUUCACAUU |
| 1200 | ACUGUGCCACAAGCCGCAUUCACAU |
| 1201 | AACUGUGCCACAAGCCGCAUUCACA |
| 1202 | CAACUGUGCCACAAGCCGCAUUCAC |
| 1203 | UCAACUGUGCCACAAGCCGCAUUCA |
| 1204 | GUCAACUGUGCCACAAGCCGCAUUC |
| 1205 | UGUCAACUGUGCCACAAGCCGCAUU |
| 1206 | UUGUCAACUGUGCCACAAGCCGCAU |
| 1207 | CUUGUCAACUGUGCCACAAGCCGCA |
| 1208 | CCUUGUCAACUGUGCCACAAGCCGC |
| 1209 | UCCUUGUCAACUGUGCCACAAGCCG |
| 1210 | AUCCUUGUCAACUGUGCCACAAGCC |
| 1211 | CAUCCUUGUCAACUGUGCCACAAGC |
| 1212 | UCAUCCUUGUCAACUGUGCCACAAG |
| 1213 | AUCAUCCUUGUCAACUGUGCCACAA |
| 1214 | UAUCAUCCUUGUCAACUGUGCCACA |
| 1215 | UUAUCAUCCUUGUCAACUGUGCCAC |
| 1216 | UUUAUCAUCCUUGUCAACUGUGCCA |
| 1217 | AUUUAUCAUCCUUGUCAACUGUGCC |
| 1218 | GAUUUAUCAUCCUUGUCAACUGUGC |
| 1219 | UGAUUUAUCAUCCUUGUCAACUGUG |
| 1220 | UUGAUUUAUCAUCCUUGUCAACUGU |
| 1221 | AUUGAUUUAUCAUCCUUGUCAACUG |
| 1222 | UAUUGAUUUAUCAUCCUUGUCAACU |
| 1223 | UUAUUGAUUUAUCAUCCUUGUCAAC |
| 1224 | AUUAUUGAUUUAUCAUCCUUGUCAA |
| 1225 | CAUUAUUGAUUUAUCAUCCUUGUCA |
| 1226 | GCAUUAUUGAUUUAUCAUCCUUGUC |
| 1227 | UGCAUUAUUGAUUUAUCAUCCUUGU |
| 1228 | UUGCAUUAUUGAUUUAUCAUCCUUG |
| 1229 | CUUGCAUUAUUGAUUUAUCAUCCUU |
| 1230 | GCUUGCAUUAUUGAUUUAUCAUCCU |
| 1231 | AGCUUGCAUUAUUGAUUUAUCAUCC |
| 1232 | AAGCUUGCAUUAUUGAUUUAUCAUC |
| 1233 | UAAGCUUGCAUUAUUGAUUUAUCAU |
| 1234 | GUAAGCUUGCAUUAUUGAUUUAUCA |
| 1235 | AGUAAGCUUGCAUUAUUGAUUUAUC |
| 1236 | UAGUAAGCUUGCAUUAUUGAUUUAU |
| 1237 | AUAGUAAGCUUGCAUUAUUGAUUUA |
| 1238 | GAUAGUAAGCUUGCAUUAUUGAUUU |
| 1239 | UGAUAGUAAGCUUGCAUUAUUGAUU |
| 1240 | AUGAUAGUAAGCUUGCAUUAUUGAU |
| 1241 | AAUGAUAGUAAGCUUGCAUUAUUGA |
| 1242 | AAAUGAUAGUAAGCUUGCAUUAUUG |
| 1243 | UAAAUGAUAGUAAGCUUGCAUUAUU |
| 1244 | AUAAAUGAUAGUAAGCUUGCAUUAU |
| 1245 | CAUAAAUGAUAGUAAGCUUGCAUUA |
| 1246 | UCAUAAAUGAUAGUAAGCUUGCAUU |
| 1247 | UUCAUAAAUGAUAGUAAGCUUGCAU |
| 1248 | AUUCAUAAAUGAUAGUAAGCUUGCA |
| 1249 | UAUUCAUAAAUGAUAGUAAGCUUGC |
| 1250 | CUAUUCAUAAAUGAUAGUAAGCUUG |
| 1251 | GCUAUUCAUAAAUGAUAGUAAGCUU |
| 1252 | UGCUAUUCAUAAAUGAUAGUAAGCU |
| 1253 | UUGCUAUUCAUAAAUGAUAGUAAGC |
| 1254 | AUUGCUAUUCAUAAAUGAUAGUAAG |
| 1255 | UAUUGCUAUUCAUAAAUGAUAGUAA |
| 1256 | GUAUUGCUAUUCAUAAAUGAUAGUA |
| 1257 | AGUAUUGCUAUUCAUAAAUGAUAGU |
| 1258 | CAGUAUUGCUAUUCAUAAAUGAUAG |
| 1259 | UCAGUAUUGCUAUUCAUAAAUGAUA |
| 1260 | UUCAGUAUUGCUAUUCAUAAAUGAU |
| 1261 | CUUCAGUAUUGCUAUUCAUAAAUGA |
| 1262 | UCUUCAGUAUUGCUAUUCAUAAAUG |
| 1263 | UUCUUCAGUAUUGCUAUUCAUAAAU |
| 1264 | UUUCUUCAGUAUUGCUAUUCAUAAA |
| 1265 | AUUUCUUCAGUAUUGCUAUUCAUAA |
| 1266 | AAUUUCUUCAGUAUUGCUAUUCAUA |
| 1267 | UAAUUUCUUCAGUAUUGCUAUUCAU |
| 1268 | UUAAUUUCUUCAGUAUUGCUAUUCA |
| 1269 | UUUAAUUUCUUCAGUAUUGCUAUUC |
| 1270 | UUUUAAUUUCUUCAGUAUUGCUAUU |
| 1271 | GUUUUAAUUUCUUCAGUAUUGCUAU |
| 1272 | UGUUUUAAUUUCUUCAGUAUUGCUA |
| 1273 | UUGUUUUAAUUUCUUCAGUAUUGCU |
| 1274 | UUUGUUUUAAUUUCUUCAGUAUUGC |
| 1275 | UUUUGUUUUAAUUUCUUCAGUAUUG |
| 1276 | CUUUUGUUUUAAUUUCUUCAGUAUU |
| 1277 | UCUUUUGUUUUAAUUUCUUCAGUAU |
| 1278 | AUCUUUUGUUUUAAUUUCUUCAGUA |
| 1279 | AAUCUUUUGUUUUAAUUUCUUCAGU |
| 1280 | CAAUCUUUUGUUUUAAUUUCUUCAG |
| 1281 | GCAAUCUUUUGUUUUAAUUUCUUCA |
| 1282 | AGCAAUCUUUUGUUUUAAUUUCUUC |
| 1283 | CAGCAAUCUUUUGUUUUAAUUUCUU |
| 1284 | ACAGCAAUCUUUUGUUUUAAUUUCU |
| 1285 | GACAGCAAUCUUUUGUUUUAAUUUC |
| 1286 | AGACAGCAAUCUUUUGUUUUAAUUU |
| 1287 | GAGACAGCAAUCUUUUGUUUUAAUU |
| 1288 | UGAGACAGCAAUCUUUUGUUUUAAU |
| 1289 | UUGAGACAGCAAUCUUUUGUUUUAA |
| 1290 | AUUGAGACAGCAAUCUUUUGUUUUA |
| 1291 | UAUUGAGACAGCAAUCUUUUGUUUU |
| 1292 | AUAUUGAGACAGCAAUCUUUUGUUU |
| 1293 | UAUAUUGAGACAGCAAUCUUUUGUU |
| 1294 | AUAUAUUGAGACAGCAAUCUUUUGU |
| 1295 | GAUAUAUUGAGACAGCAAUCUUUUG |
| 1296 | AGAUAUAUUGAGACAGCAAUCUUUU |
| 1297 | AAGAUAUAUUGAGACAGCAAUCUUU |
| 1298 | UAAGAUAUAUUGAGACAGCAAUCUU |
| 1299 | AUAAGAUAUAUUGAGACAGCAAUCU |
| 1300 | UAUAAGAUAUAUUGAGACAGCAAUC |
| 1301 | AUAUAAGAUAUAUUGAGACAGCAAU |
| 1302 | AAUAUAAGAUAUAUUGAGACAGCAA |
| 1303 | AAAUAUAAGAUAUAUUGAGACAGCA |
| 1304 | UAAAUAUAAGAUAUAUUGAGACAGC |
| 1305 | AUAAAUAUAAGAUAUAUUGAGACAG |
| 1306 | AAUAAAUAUAAGAUAUAUUGAGACA |
| 1307 | UAAUAAAUAUAAGAUAUAUUGAGAC |
| 1308 | AUAAUAAAUAUAAGAUAUAUUGAGA |
| 1309 | AAUAAUAAAUAUAAGAUAUAUUGAG |
| 1310 | AAAUAAUAAAUAUAAGAUAUAUUGA |
| 1311 | UAAAUAAUAAAUAUAAGAUAUAUUG |
| 1312 | GUAAAUAAUAAAUAUAAGAUAUAUU |
| 1313 | GGUAAAUAAUAAAUAUAAGAUAUAU |
| 1314 | UGGUAAAUAAUAAAUAUAAGAUAUA |
| 1315 | UUGGUAAAUAAUAAAUAUAAGAUAU |
| 1316 | UUUGGUAAAUAAUAAAUAUAAGAUA |
| 1317 | AUUUGGUAAAUAAUAAAUAUAAGAU |
| 1318 | AAUUUGGUAAAUAAUAAAUAUAAGA |
| 1319 | UAAUUUGGUAAAUAAUAAAUAUAAG |
| 1320 | AUAAUUUGGUAAAUAAUAAAUAUAA |
| 1321 | AAUAAUUUGGUAAAUAAUAAAUAUA |
| 1322 | GAAUAAUUUGGUAAAUAAUAAAUAU |
| 1323 | AGAAUAAUUUGGUAAAUAAUAAAUA |
| 1324 | UAGAAUAAUUUGGUAAAUAAUAAAU |
| 1325 | UUAGAAUAAUUUGGUAAAUAAUAAA |
| 1326 | CUUAGAAUAAUUUGGUAAAUAAUAA |
| 1327 | UCUUAGAAUAAUUUGGUAAAUAAUA |
| 1328 | CUCUUAGAAUAAUUUGGUAAAUAAU |
| 1329 | ACUCUUAGAAUAAUUUGGUAAAUAA |
| 1330 | UACUCUUAGAAUAAUUUGGUAAAUA |
| 1331 | AUACUCUUAGAAUAAUUUGGUAAAU |
| 1332 | AAUACUCUUAGAAUAAUUUGGUAAA |
| 1333 | AAAUACUCUUAGAAUAAUUUGGUAA |
| 1334 | GAAAUACUCUUAGAAUAAUUUGGUA |
| 1335 | AGAAAUACUCUUAGAAUAAUUUGGU |
| 1336 | AAGAAAUACUCUUAGAAUAAUUUGG |
| 1337 | GAAGAAAUACUCUUAGAAUAAUUUG |
| 1338 | GGAAGAAAUACUCUUAGAAUAAUUU |

*At least one (i.e., one or more) nucleoside linkage of the oligonucleotide sequence is
independently selected from a phosphorothioate linkage, an alkyl phosphate linkage, a
phosphorodithioate linkage, a phosphotriester linkage, an alkylphosphonate linkage, a 3-
methoxypropyl phosphonate linkage, a methylphosphonate linkage, an aminoalkylphosphotriester
linkage, an alkylene phosphonate linkage, a phosphinate linkage, a phosphoramidate linkage, a
phosphoramidothioate linkage, a thiophosphorodiamidate linkage, a phosphorodiamidate (e.g.,
comprising a phosphorodiamidate morpholino (PMO), 3’ amino ribose, or 5’ amino ribose)
linkage, an aminoalkylphosphoramidate linkage, a thiophosphoramidate linkage, a
thionoalkylphosphonate linkage, a thionoalkylphosphotriester linkage, a thiophosphate linkage, a
selenophosphate linkage, and a boranophosphate linkage.

[0254] Table 3 below identifies exemplary STMN2 AON sequences:

TABLE 3
Exemplary STMN2 AON Sequences, in each one or
more spacers described in the present disclo-
sure are incorporated for generation of an
oligonucleotide of the present invention

| SEQ ID NO: | Oligonucleotide sequence |
|---|---|
| (legacy ID*) | (5′ → 3′) |
| SEQ ID NO: 31 | AATGTTAAGACATAATACCAGAGCT |
| SEQ ID NO: 36 | TTAAAAATGTTAAGACATAATACCA |
| SEQ ID NO: 41 | TAGATTTAAAAATGTTAAGACATAA |
| SEQ ID NO: 46 | TACCATAGATTTAAAAATGTTAAGA |
| SEQ ID NO: 55 | TGTAAAGATTACCATAGATTTAAAA |
| SEQ ID NO: 144 | AATCCAATTAAGAGAGAGTGATGGG |
| SEQ ID NO: 146 | AAAATCCAATTAAGAGAGAGTGATG |
| SEQ ID NO: 150 | TTTAAAAATCCAATTAAGAGAGAGT |
| SEQ ID NO: 169 | CCTGCAATATGAATATAATTTTAAA |
| SEQ ID NO: 170 | TCCTGCAATATGAATATAATTTTAA |
| SEQ ID NO: 171 | GTCCTGCAATATGAATATAATTTTA |
| SEQ ID NO: 172 | AGTCCTGCAATATGAATATAATTTT |
| SEQ ID NO: 173 | GAGTCCTGCAATATGAATATAATTT |
| SEQ ID NO: 177 | TGCCGAGTCCTGCAATATGAATATA |
| SEQ ID NO: 181 | CTTCTGCCGAGTCCTGCAATATGAA |
| SEQ ID NO: 185 | AGGTCTTCTGCCGAGTCCTGCAATA |
| SEQ ID NO: 197 | CCTTTCTCTCGAAGGTCTTCTGCCG |
| SEQ ID NO: 203 | TTTCTACCTTTCTCTCGAAGGTCTT |
| SEQ ID NO: 209 | TCTTATTTTCTACCTTTCTCTCGAA |
| SEQ ID NO: 215 | CCAAATTCTTATTTTCTACCTTTCT |
| SEQ ID NO: 237 | GCACACATGCTCACACAGAGAGCCA |
| SEQ ID NO: 244 | CACACACGCACACATGCTCACACAG |
| SEQ ID NO: 249 | TCTCGCACACACGCACACATGCTCA |
| SEQ ID NO: 252 | CTCTCTCGCACACACGCACACATGC |
| SEQ ID NO: 380 | TGTTTTAATTTCTTCAGTATTGCTA |
| SEQ ID NO: 385 | TCTTTTGTTTTAATTTCTTCAGTAT |
| SEQ ID NO: 390 | AGCAATCTTTTGTTTTAATTTCTTC |
| SEQ ID NO: 395 | GAGACAGCAATCTTTTGTTTTAATT |
| SEQ ID NO: 400 | ATATTGAGACAGCAATCTTTTGTTT |

*At least one (i.e., one or more) nucleoside linkage of the oligonucleotide sequence is
independently selected from a phosphorothioate linkage, an alkyl phosphate linkage, a
phosphorodithioate linkage, a phosphotriester linkage, an alkylphosphonate linkage, a 3-
methoxypropyl phosphonate linkage, a methylphosphonate linkage, an aminoalkylphosphotriester
linkage, an alkylene phosphonate linkage, a phosphinate linkage, a phosphoramidate linkage, a
phosphoramidothioate linkage, a thiophosphorodiamidate linkage, a phosphorodiamidate (e.g.,
comprising a phosphorodiamidate morpholino (PMO), 3’ amino ribose, or 5’ amino ribose)
linkage, an aminoalkylphosphoramidate linkage, a thiophosphoramidate linkage, a
thionoalkylphosphonate linkage, a thionoalkylphosphotriester linkage, a thiophosphate linkage, a
selenophosphate linkage, and a boranophosphate linkage.

[0255] In some embodiments, all internucleoside linkages of the STMN2 AON oligonucleotides listed in Table 3 are phosphorothioate linkages (except when a spacer is present, the linkage may or may not be a phosphorothioate linkage), and each of the linked nucleosides of the oligonucleotide are 2′-O-(2-methoxyethyl) (2′-MOE) nucleosides, and each “C” is replaced with a 5-MeC. In some embodiments, all internucleoside linkages of the STMN2 AON oligonucleotides listed in Table 3 are phosphorothioate linkages, and each of the linked nucleosides of the oligonucleotide are 2′-O-(2-methoxyethyl) (2′-MOE) nucleosides, and not all or none of the ‘C” is replaced with 5-MeC.

TABLE 4
Table 4 below identifies additional exemplary
STMN2 AON sequences:
Additional Exemplary STMN2 AON Sequences
(corresponding to AONs shown in Table 3
but with thymine bases replaced with
uracil bases)

| | Oligonucleotide sequence |
|---|---|
| SEQ ID NO | (5′ → 3′) |
| SEQ ID NO: 923 | AAUGUUAAGACAUAAUACCAGAGCU |
| SEQ ID NO: 928 | UUAAAAAUGUUAAGACAUAAUACCA |
| SEQ ID NO: 933 | UAGAUUUAAAAAUGUUAAGACAUAA |
| SEQ ID NO: 938 | UACCAUAGAUUUAAAAAUGUUAAGA |
| SEQ ID NO: 947 | UGUAAAGAUUACCAUAGAUUUAAAA |
| SEQ ID NO: 1036 | AAUCCAAUUAAGAGAGAGUGAUGGG |
| SEQ ID NO: 1038 | AAAAUCCAAUUAAGAGAGAGUGAUG |
| SEQ ID NO: 1042 | UUUAAAAAUCCAAUUAAGAGAGAGU |
| SEQ ID NO: 1061 | CCUGCAAUAUGAAUAUAAUUUUAAA |
| SEQ ID NO: 1062 | UCCUGCAAUAUGAAUAUAAUUUUAA |
| SEQ ID NO: 1063 | GUCCUGCAAUAUGAAUAUAAUUUUA |
| SEQ ID NO: 1064 | AGUCCUGCAAUAUGAAUAUAAUUUU |
| SEQ ID NO: 1065 | GAGUCCUGCAAUAUGAAUAUAAUUU |
| SEQ ID NO: 1077 | AGGUCUUCUGCCGAGUCCUGCAAUA |
| SEQ ID NO: 1089 | CCUUUCUCUCGAAGGUCUUCUGCCG |
| SEQ ID NO: 1095 | UUUCUACCUUUCUCUCGAAGGUCUU |
| SEQ ID NO: 1101 | UCUUAUUUUCUACCUUUCUCUCGAA |
| SEQ ID NO: 1107 | CCAAAUUCUUAUUUUCUACCUUUCU |
| SEQ ID NO: 1129 | GCACACAUGCUCACACAGAGAGCCA |
| SEQ ID NO: 1136 | CACACACGCACACAUGCUCACACAG |
| SEQ ID NO: 1141 | UCUCGCACACACGCACACAUGCUCA |
| SEQ ID NO: 1144 | CUCUCUCGCACACACGCACACAUGC |
| SEQ ID NO: 1272 | UGUUUUAAUUUCUUCAGUAUUGCUA |
| SEQ ID NO: 1277 | UCUUUUGUUUUAAUUUCUUCAGUAU |
| SEQ ID NO: 1282 | AGCAAUCUUUUGUUUUAAUUUCUUC |
| SEQ ID NO: 1287 | GAGACAGCAAUCUUUUGUUUUAAUU |
| SEQ ID NO: 1292 | AUAUUGAGACAGCAAUCUUUUGUUU |

STMN2 Transcript with a Cryptic Exon

[0256] In one embodiment, a STMN2 AON targets a region of a STMN2 transcript comprising a cryptic exon sequence, the STMN2 transcript comprising the sequence provided as SEQ ID NO: 1339.

(SEQ ID NO: 1339)
ACTTGTAATATACAGGTATCCCTCCTGGTAAGCTCTGGTATTATGTCTTA
ACATTTTTAAATCTATGGTAATCTTTACAAAATATTTTACTTCCGAACTC
ATATACCTGGGGATTTTATTACTCTGGGAATTATGTGTTCTGCCCCATCA
CTCTCTCTTAATTGGATTTTTAAAATTATATTCATATTGCAGGACTCGGC
AGAAGACCTTCGAGAGAAAGGTAGAAAATAAGAATTTGGCTCTCTGTGTG
AGCATGTGTGCGTGTGTGCGAGAGAGAGAGACAGACAGCCTGCCTAAGAA
GAAATGAATGTGAATGCGGCTTGTGGCACAGTTGACAAGGATGATAAATC
AATAATGCAAGCTTACTATCATTTATGAATAGCAATACTGAAGAAATTAA
AACAAAAGATTGCTGTCTCAATATATCTTATATTTATTATTTACCAAATT
ATTCTAAGAGTATTTCTTCC

[0257] A cryptic exon sequence within the STMN2 transcript is provided as SEQ ID NO: 1340.

(SEQ ID NO: 1340)
GACTCGGCAGAAGACCTTCGAGAGAAAGGTAGAAAATAAGAATTTGGCTC
TCTGTGTGAGCATGTGTGCGTGTGTGCGAGAGAGAGAGACAGACAGCCTG
CCTAAGAAGAAATGAATGTGAATGCGGCTTGTGGCACAGTTGACAAGGAT
GATAAATCAATAATGCAAGCTTACTATCATTTATGAATAGCAATACTGAA
GAAATTAAAACAAAAGATTGCTGTCTC
(Source: NCBI Reference Sequence: NC_000008.11).

[0258] In various embodiments, the STMN2 transcript with a cryptic exon shares between 90-100% identity with SEQ ID NO: 1339. In various embodiments, the STMN2 transcript with a cryptic exon shares at least 90%, 91%, 92%, 93%, 94%, 95%, 96%, 97%, 98%, or 99% identity with SEQ ID NO: 1341.

[0259] In one embodiment, a STMN2 transcript with a cryptic exon can comprise a pre-mRNA STMN2 transcript. In one embodiment, a STMN2 transcript with a cryptic exon can comprise the sequence provided as SEQ ID NO: 1341.

(SEQ ID NO: 1341)
AGCTCCTAGGAAGCTTCAGGGCTTAAAGCTCCACTCTACTTGGACTGTACTATCAGGC
CCCCAAAATGGGGGGAGCCGACAGGGAAGGACTGATTTCCATTTCAAACTGCATTCT
GGTACTTTGTACTCCAGCACCATTGGCCGATCAATATTTAATGCTTGGAGATTCTGAC
TCTGCGGGAGTCATGTCAGGGGACCTTGGGAGCCAATCTGCTTGAGCTTCTGAGTGA
TAATTATTCATGGGCTCCTGCCTCTTGCTCTTTCTCTAGCACGGTCCCACTCTGCAGAC
TCAGTGCCTTATTCAGTCTTCTCTCTCGCTCTCTCCGCTGCTGTAGCCGGACCCTTTGC
CTTCGCCACTGCTCAGCGTCTGCACATCCCTACAATGGCTAAAACAGCAATGGTAAG
GCACTGCGCCTCGTTCTCCGTCGGCTCTACCTGGAGCCCACCTCTCACCTCCTCTCTTG
AGCTCTAGAAGCATTCAGAGATATTTTATAAAGAAAAAGATGTTAATGGTAACACAG
GACCAGGAAGGACAGGGCAGTTCTGGGGGAGGTGGGAGGGCAGAGAAGAGGTCTAT
GGAAATCTAAAGCGAAGAATTTCTTTTAAAAGGTAGAAGCGGGTAAGTTGCCCTCCT
ATGGGTAGAGAATTTATTCTGTTTCCATATTTAAAATTAGGACTCAATCGTGAGGGGA
GGAAGCTACCTTAACTGTTTGCCTTAAATGGGCTTAAGGGACATTTTGGAAAGTGCTT
TATAACGACCTTTTTTTTTTTTATTTCTTCTCTAGTTTAAGAAGAAAATAGGAAAGGG
GTAAAGGGAAGGTGGGAGAAAGGAAAAAGAAAATTGCAAAGTCAAAGCGGTCCCAT
CCCGCTGTTTGAAAGATGGGTGGAGACGGGGGGAGGGGATGGAGAGAACTGGGCAC
ATTTTACGGTATTGTCTCGTCGAAGAAACCGCTAGTCCTGGGGTGCGGTGCAGGGAG
GTAAGACGGCGGGGGACAGGGTGGGGGTAGGACCTCCGCTCCTTTGTTTTAGGGCAA
GGGAGGGGAAGGAGAGAGGAAGTCGCGGAGGGCGTGGAGGGCGCGGGTGGGCAGC
TGCAGGGGCGGGGAAGCGCGCGGCAGGGAGGGGTGGAGGGACAGCGGCTTCGAAG
GCGCTGGGGTGGGGTTTCTTTGTGTGCGGACCAGCGGTCCCGGGGGGAGGCACCTGC
AGCGCTGGGCGCACAATGCGGACAGCCCCACCCAGTGCGGAACCGCGCAGCCCCGC
CCCCCCGCCCGGTGCTGCATCTTCATTCGAAAGGGGGTCGGGTGGGGAGCGCAGCGT
GACACCCAGGAGCCCAACCCTGCGGGGACAGCGGCGCCACGCCCCGCGCTCCCCGCT
CCCGACTCCCCGCCGCGGCTTCCAAGAGAGACCTGACCACTGACCCCGCCCTCCCCA
CGCTGGCCTCATTGTTCTGCTTTTAAGAGAGATGGGAAAAGTGGGTTAACATTTTTCT
TTTCGGAAGCAAATTACATAGAGTGTTTAGACATAGACACAGATAAAGGGTTCTTTG
AAGACCTTTGATCGTTTGCGGGAAAAGCTTCTAGAACCTAGACATGTGTATGTATAAT
AATAGAGATGACATGAAATCGTATATAAAGCAAAAGAGGTCAAAGTCTTAAGTTAA
GCCACGCGAAATTTCCGTTTTGTGGGTCAGACAGTGCCAAATATCGGCAATTTCATAA
GCTCAGAGAGACAAGACAGTGGAGACACAGGATGACCGGAAAAGATTCTGGATTCA
GGGCCTTCATCCGCAATTGGTCTTGTGCCTTGAGTGCCCACGGTTCTGGCGCTCAGTG
GCCCCGGGGTGAAAAGGCAGGGTGGGGCCTGGGGTCCTGTGGCAGCTGGAAGCACG
TGTCCCCCGGGACTTGGTTGCAGGATGCGGAGACAGGGAAAGCTGCCGAAAGGACTC
CATCTGCGCGGCTCCGCCCTGCCCTACCCTCCCCGCGGAGCCGGGGAGACCTCAGGC
TCCGAGACTGGCGGGGAAGAGGAATATGGGAGGGGCAGTTGAGCTGTATGCAGTCC
TGGAACCTCTTTTTTCAGCCCCGCAGTCCACAACGGCCCGAGCACCCCTTGATGTGCG
CAGACCCCCGGCGTGGCTCTCAGCCCCAGCACCGAGCCCCTCCCAGCCAAGCGGGTG
GCTCTGCAGAAAAGCTGGCTCGAGCCCCGCCCGGCCACACAAAGGCGCGGCCCCACC
CAGCCCGGGCGCGAGACCGCAGAGGTGACCCCCTTCCCAGGGATTCAGGGAGGGCT
GTCTCTTCTCGCCCACCCACGGTCCGCGGAGCTCGGGGCTTTTTTTCCCCCAGCCCAA
GCCCCCCGCCCACCCTCTGTTCTCTATGATTTTCCAGAATGGAGACCCCGCGAGGGGC
TTCTCTAAGGGAGACCCTCGCTCCTCCAGCGGGGCGCGGCTCGGCCCCACCCCTCCCA
GCTGAGGCCCAGAGCCGCCTACCGCTGGCCGGGTGGGGGCGCACGTGGCGACTGGGT
GTGTGGAGCGCAGCCAGCCCTGCAGAGCCCCGCGCCGCGCCCTGCGCTCCCCTCCCC
GGAGTTGGGCGCTCGCCCCCGCGGTGCAGCCGGGGAGACCGGTTTCTGCGCAGTGTC
CTGAGCTACCCCCGCTTTCCACAATTCGCAGTTCACTCGCACGTCCAGAAAGGTTCTG
AGAATGGGTGGTGGGGGCGATCTCGCCTCGCTTTCTGCACCCCTCAGAAAGGTTTCC
GCTGCAGGCTAGTGGCTGCAAACTCATCGTCATCATCAGTATTATTATCATTTCAAAT
CGTTGTTATTATTTAATGATTCAGTAGCCTTGTTTGTTCTCATTTGTTCAAAAGGGACG
TGGATTGCTCTTGGTTAAGGATTAACCCTTGTTGCGTTCGCTTTGCTTCCTCCTAATTG
CCCTCATCCCTTTCCCCCACAAAAAGGTAAATTTGTCTCCAGTTGTTCATTTTAAGTTA
TAAAGCAAATATATTTTTGCTTCCTGCCAGGATTATGTATGTTCATGTGGCTAAGATA
CATGTGCAAGTGCTTGCTAAGAGCAGGGTTTGTGTGCCAACGATTGCTGGAAAATTC
TCTGCAAAGAATTGTTTGTGGCTGCAATGGGTGAGAATACACATATATAATTGAGAT
GATCTTCAACATAAGGTTATATCTATAAATATATAAATATAGTTTATGCACAAAATTT
TAAGTTTTTTCCCCTGAAACTGTTCTTCCAACTGCTGATTCTTGATACAGCCTCAATCC
TACACAGATACATGGATCGTGAAATGGTAGCCGCCATCCAAATAAAAATCCCACCCC
AAATATGACAAACGCAAGCATCCTTTCTGGCCATAATTTAACTGCATTTGCAAATCAT
GAAAAAAACACTACTTCTGCAGTATTAAAATAATAGATTTTGAAATTAATTCCAATTT
CAAAGATAATTAATTATCAGGGCGAGTGCTTTTTTCCTGATTCATTAAACAATTATGT
ATTCAGCATGATTGTAAGAGGTGCATATAATATTCCCCATTATCTTTTCTAATGAAGT
GGGCACCTTCTGAATGGATATATAAGTAACTAGAAATGAAAAGCTGAGGATTTGGTC
AGAATTTCAGGATAAAACTGAAAGAAATGGCAGTAGTTTATCAATTAATCTCATGTA
TTTAGTTTATACCAGGTGAGTAAGCTGAGCCTGCAATAAACACTCTCTGTCCCAGTGT
AACACGTCGCAGGTAGCTAGAATGATAGGATAAATTAATAGACCTTGTGGTGTTTGT
CTATGCACGTTAAAATTCTCTGAGAGAAAGTATATTTTAAAATGATAATTAAGATTGG
ACATTTGTGCTATTAAAATCTACAACTTTAGTCAAAATTCACAATGGTTTTTTTTTACA
ATAATGTGACTTACAGATTTGTAGTAAATTATTCTATTCTAAAAGAGAAATGAGTGTT
TTTATTGTTACAGCTATTACCTCATTAATATTTTTAGCAAACTTTTATTTGTTGCATTG
AAAGCAGTTTTAATTACTTTGGGTTTTTATTTTTCAAATTACTAATGGATAGATGGTG
GAATAAGCATTTAATCATTTGGCACAATATGACTTCCATCAAATAGCTCATTCTCAGT
GATTAAAAAATGCTACAAGAGGCTACAATTTACTCAGATTCAGGAAATGTCCTTTCA
GAGTGCCATAAGGCTGATTCATATAATAAAATAGTTTTCTTCCCTATAATTTAAGATC
AAATAGTTACTTAGTTCTGTGAATACCTAGCAGTAGCTATCAAACAGAATTTTAAAGT
TAAATCTGTACAACTAACAATGAAGTGGAGGATGAATCGATACATATTGAATGGAAG
ACTTTGTCATTGATAAATTCAGGCCATCTTTAGGAAAATTCCGGATTTATCAATCACC
ATTATTTTTTACTTCAACTGAGTGTGACTGATCACATGCTCAGGCTACCTTGGTAGCT
CATTGCTCACAGGAGGCTGAAAAAAGCTGGCCTCCGAGCAGGAGGAAGCTCAGAGC
ACAAACCTAGGCCTGGGCGTGGCCACTGGGAGCTGCTGATAGCGAACCCCAGCTCAC
ACCAGTTTCTTTTTTGGTCGTGGGAAGAAAAACACATATTATCCTGTTGTCACAAGAT
CTGTGACCTTATATGAAAAAATGCTAGAATTTTTTCATTAAAAAAGAAAATACTGAA
CTAGCCAGTGACCCAGATGTTTTCAGAACCTAGACTGGTTCTGTCCATTGGAAAACCT
CGGTGTCTGCATTAACTTTTCACCACACTAGAGGGCAATCATGTTCTCTAAAAAAGCA
GATGATTGATGTAAACCTAGTTCCAAATATTAACTGTTTAATAAAATCTTTTCTTTTAC
CAGGAACATTCAAGTGTTTATTCAATAAGCTGATGCCATGCTTTACCCTAGTGGATGA
ACAGAGCTTGTACAATTTTCAAGGAGACAGGATGAAATGAGTGGTCATAATCTGAAA
GTAGATACACGCCCTGGTTAATTATTCCCTGATGGTTTTACTTCTCAGTTTTATTACAT
TGTTATTATAATACCATTTATGTTACTTCTGAGATTTTGTAGTGGATAAATAGTAGAA
AAATGTCAGTAGTAATAGCAAAGTTATTTAGCAGCCGAATATTTTAATGCTTAAAAA
TAAAGGAATAAATTAAAGAAAATCATTGTTTACTTCTTCATCGATTGAAATGTGCCCC
CTGTTCAGAGCACATCTGAATATCAGAGTCTCCACCTGCAGAGAACATGCAGCTTAG
CGAGTAAAACAGGCAGGTATGTGATACTGAGGAGGTGTACCAAAAACTGACTGCTGT
TATTTTTCCCATCTTCTAAGTCTGTCTTTCTTTTCCATTTAAAGATACCTTTTTAAACT
AATCCAATGTGATTTCAATCTAGTTTTATCAGATTTCAACAATTATTGAGCATCTCCTT
GTAGTGGTTTTCTGTTTATTAGAAAATCGATGTTAATTTTAACGAAGTAAGAAGAAAT
ATATAAGTATAAACTAATTTTGGGTATCATCAAAAGTGGATTTTTTAAATATGCATTG
ATAGAATTATTTTTTGATTACATTTTATGTAATTCTAATCCAGCTATAAAATATTTAAT
AGTGTCATATTACTGTGTTCCTCAAACTTTGATGTGCATATGAATTACCTTTGATTTTC
ATTAAAATGCAAATTCTGATTCAATACATCTGGCTTGAGGCAGACATTCTGTCTTCCG
AACAAGCTCCCAGATGATGCTGATTCTGACCACTAAACACATCAGTTTTAGGGATATT
AACTTGTAATATACAGGTATCCCTCCTGGTAAGCTCTGGTATTATGTCTTAACATTTTT
AAATCTATGGTAATCTTTACAAAATATTTTACTTCCGAACTCATATACCTGGGGATTT
TATTACTCTGGGAATTATGTGTTCTGCCCCATCACTCTCTCTTAATTGGATTTTTAAAA
TTATATTCATATTGCAGGACTCGGCAGAAGACCTTCGAGAGAAAGGTAGAAAATAAG
AATTTGGCTCTCTGTGTGAGCATGTGTGCGTGTGTGCGAGAGAGAGAGACAGACAGC
CTGCCTAAGAAGAAATGAATGTGAATGCGGCTTGTGGCACAGTTGACAAGGATGATA
AATCAATAATGCAAGCTTACTATCATTTATGAATAGCAATACTGAAGAAATTAAAAC
AAAAGATTGCTGTCTCAATATATCTTATATTTATTATTTACCAAATTATTCTAAGAGT
ATTTCTTCCTGAATACCATGTGAGAAAATTCTTAAGAATTTATTGAGTATGACTGTAT
ATTTGAAAAGAGTGTTTTCTTCTGCTTATCTAAGCCAATAAAGGATCTTCATTATTCA
ATTCTAACTTTCTAAGGAAGTCAACCTACAGATCAGAAAGAGGATCTTCAAGGAATA
GCATCAAAGACATAGTCAGGTCTCCCATGCAGTGACTGGCTGACCATGCAGCCATTA
CCACCTTTCTGGAAATATTATGCTGCAAAAATGATACAATACACGAAATATCTCAAA
TTAAAAAATATAACATTTCCCAAATAGGGCACTAAAAACATGATCCCAAATAAAACT
AGCTTCAGGGTTTGCAGAATATACTGTTACTCAACACAAAGTTGGACTAAGTCTCAA
AGTTAGCCATTCAGTTGTTGTTAACAGTTCATTTCAGGGTCTCTCAGAAGCTGGGAAA
CTTTCCATTTTTGCAATTTCTTGTACATTGAAGGAAAGGAAGACACACTTAAGACAGC
ATTACAAAAGTAATTCATGTTTTAAATGTTTAATTCTGGCAGTCGGGCAGGGCTCTCT
GTATAACCTCATTTGGAGATGACAAAAATCTAAACTTGAGGGCCTCGAGCCAATAAG
TCTTCCTATTTCTTTACTCAAACATTTTCCCGCAATGGTGCTTTCTTTCAACTGTTTTTC
TGGTGTATTCATAAATTCCAGATTCTCTATGGGAAGTAACTTTTATTGATTGATTTAA
CCCTTGTATAGCACATATAACATGCAAGGCATTGTTCTAAGAACTTTCCACATATTAA
CTGTGTTAATCACTTAATAATCCTAAGTAGGTTCTATTACAGATATGGAAACTGAGGC
ACAGAAAGTTGAAGTATCTTACTCAAGGTCACACAGTTAGTCAGATCCAGAATTTGG
GCCCAGGCCATCTGGCTTCGGAATCCATCTTTCACCGATTGCTGCTAGTCTCATATCT
GTTCCATGTTAGAGGTGAGCTCCCATTGCAGAGGTCACACCTGTGATATCACCATTTT
ATTTAAACAGACCAGAGATGGTCTTCTCCTTTCTGATCACAGACTCACCTTGAAGAGA
AAATACTTCCAAATTGATGCCTAGTTTTAATAGCTTACCTGGGGCTTATTCAAATAAT
TGCCATGATTTAGGCTTTGGGAGAAAGAGAGCTATGAGGCCGTGTGGGTTGTAACGT
ATGAGACACATGGCGTTCTGCAGGCTCAGCACAGCATCGATTTCTGGTGGGAACACA
CTCTGATGACCAGTTCCAGAAATAACATTGACTTAATCTCCTCAGTCCCATCATGGTT
AGCACATTTCAAAATGCCTCCTTAACTACTTCCATAGGCCAGAGATATTTAGTTTTAA
CATTTTGTTGAATAAAATAAATTTACACATTCACATTTAATATAACTATTAGATGTTA
TTTCAAGATTCTCTTCATATTACCATCAAAGCAGGCAGGCAGGCAGGAGAGAACTGT
AGGAAGGTTTTGAATCCCTTGTGAAACATTTTTAATTATCTTTTAATAAAGGAATCAG
GCCCTGTCATTTGTCAAGGAGACATTTGCAGTAGTAAAGCTTGTGTTTATAATATCCA
TTTTTATTAGTCATGATTAAAGATAACATTTGTGTACATTTGTTCTCACAAAACACTTT
TATATGAGTGTAAAGGTTAATTAATGCATTTCAGCCATCATTTTGCTGGTCATGTGGA
AATATAGCTTCTTTAGGAATTGTACTTAGAGTAGGAGCCACATATTATACTATAAAAC
CATAACAAAAATATTTTAAGTTTGTTCTCACTTGTTGTTGACCTCCAGAGTAAAATAT
TTAATACTCTGGAAAGTTATGGGTTTCAAAATTTATTTTATGGCAAGAAATAGATAAT
TACAGTTCTCATAGAGCACATTTAAAATAATTTATTTTTATAGGGCAAAAATATTGCC
TAGGACTGAATGATTTTTTTTTTTTTACAAAGATTGTAAAGCAACGCCTGCAAGAGTG
CCCATTTAGCAGTTATTCTTCTGGAATAATTGTATTTTGGATGTTGGAGTTCGCACATT
AACCATTAGTACAAGTACCCAATATAACAATAGATCATCAGGATAATAAATCTGTCC
ATCTTTTAGTTGTATGTCTTTATATCAGGATAAAGAGAATTGAGTGAAATTTATCTAA
ACCTAGTCCCACAAATACTTTTACAAGAGAGCATGTTAAAGTGTAAATTAAATTTTTA
TTAGCATTCTACTCTGTCTTTGGAAGTTTTTTTTCCTTATGAAATGCAGCCATAAAGTT
TAACTTCCATTAACAAAGCTGCTCACAGTAAACCTATTATAATAATAGTTTCCCAGTT
TGGGCTTCCTAGTGAGGAGCAACCTAACTCACACGAAACAACCCCAACTTATAATAT
ATTGACTGTTACAAAACTGAGACCAGAAAATCCCATCAAGATGGTACTGTTATCATTT
CCAGACTCTCGGGAAGAACATTAATCATCTCAGGCACTTTTAGGATAGACTTATTGCA
GCCTCCCTGGGAACTCTGCTTCAGAACATAATTATTTTTATTAATGCAGAGTTACTTTT
TATTTCCAACAAAAATATCTATTGTTATTATTTAAGTCTTACAGCTTTATCTGAGAAAT
TCCAATTAGCACCCTTCTCATAATAAATATTCAAACACATGAAAAATTACCAAAGTTG
TTCTAGTCTTTTAATGACATATTACATGATCCTGCACTCTTGTCACTTTAAAAATTATC
TTTTTATTATATTTCTGATGATTTTTTTCTTATATAGTTTTTTAAAAGGAGCAGGCAAG
CATAGAAGACTAAAAAATGTTCAAAAGAAAAATTAAATCGCATGATCTATCTATATG
GGACCTTGTCATTTTTAGAAAACATTCACCTGCTTCATCCTTTTGAATCTTCATATAAT
CCCTCTGAGATGGGCATACTATACAAGTTGTCTTATTTAAAGATTGGTAAATTTAAGC
TCAAATAATTTATTCAGTGGCAAGCCTCAGAGGCAGACTCGGAACACAGGTCTAATA
TATATTATATATATATTATAACATATAATATATATATTACATATAATAAAGTTGTGTA
TATTATTTACCTATCAAAATATTTATATGTAATATATAAATATGTTATATATCATGTAT
GTGCCTATTTCATACATATATACACATTCATGCAAAATAAGGTTTAGCACTCCCTCCA
CTGTCCTGTAATAAAACATGCACAGTGAGAATAGTCATACACGAGGCATATTTGTCTT
CAGTTTAAAGTCATTGATAGTCAGTGTCACTAACTAAAGTAAAATAGATTGGAGCAC
CAACTTTGTTCTGAAGCCTGTGCCAGGTATTATGAGAACAAAAATAAAAATGTTCCTC
ACCCTTGGTGGATTTAGTCTTTTGCAGAAAAAAAGATCCTGTACATGTCAGAAAGTTC
AATAGTAATAATGGTAATTTATAACTATAAATGGAAGTCACCATCTCACAATTTCACC
ATCTTAACAATTTTGTTAAACTGCCCTACAATATTACAAGATAGTACATAATGATACA
CTAGTAACATCAACTAGGAAGTACCAAGATCCACCAAAAGGCTGAAAAATTTAAATA
TTTAATGAGTCCATCAACCAATCTGGCCAGAGAATTCTTTAATTAAAATGCTTCCCAA
ATTTTACTGAGAATCAGCAGCGTTTGAGGAGCTAGCCTCCACCCCCAGAGGTTCTCAC
TCTATTAGGTCTGAAGCAGGTCCCATGGATTTGCATTTCTAACAAGCTCCCAGGTGGT
GCTGATGAGGCTGATTCAGAACCACACTTGGAGTAGACCTAAAACAGCAGTGACCTG
TAGGGTCCCCAAGCAGCAGGCCAGGACAGCATGTGAGTTACGTCCTCTGTGGAGCTC
TGCAACAAGGCGTCAAGAGGTCAGAGTCTAAGTCCCCATCAGCTCTGCCCTTCTCCA
CCAGTGCTGCTGGTGCTGCATGGAAGGAAGAGCCCAGAAGGGATTCTGAGTTTCAGT
CTTTACTCTTGCTGACGCACCTTGGTCAGGTCAATTTTCCTGTTTGTTCCTCTAATTCA
GCATCTGTAAAATAGCCATGTGAACTGCCTTGTCCATATCAGAGGGTCTTTTTCAGAC
TCAAGGAAAAAAACGTGAAAGTGATTAGTGTCTGTCAAGTAGTATATAAATGCAAGA
AGTTGAGTTTTTAAATTGTCATTAGATATAAATACCCATGTGCATGCATTTAGAATGA
GTAAAGAGGGAACAAGGAGCGCAATCAAAAACTGCGTCATTTGCTTTTTGAAAAATA
CTTTCTATGTAATGAAAAGTGAAATAAAATGTTAATTGAGTCCCTCTGACAACAGCAT
CAGACGTTTTGCAGTTCTTGTGATTAGAACCCACCTGGCCAGCCCTTCTTCCTCCTAA
AGAAGAGCCTTCTTCTTCTTAAATGAAGGTTGGCTCAGAAGAAGCAATTAACTCATTC
AACGTTTTGTTACAGTCAATCCACATCCAACTTTTCCCCAACTCAATCTGCTTTAAGG
GAAGGATGGTAAGTGGTGGCCCAAGATGGCAACCATCAAGCTTAGAGAATCTCTAGA
AGCAGGGGTGTCCCCAGCAAGTAGACACTGAAAATATGAGAGGGCTGATAAGCCAG
AGATAAAACTCAGTACTTACTTTGCTTCTAGTCCATGTCTACCCCTTTCTTGGCACCAC
CTTGACACTACCCTCTGAGTCCACCTTCCTGAGATGGTACAAACTCTGCTTAGACAAA
GCAGCCCATGTCCAAAGGTGTTAGGGCTCAGTTTAAAGCTGCCTTCAAAAGTTAAAA
CAGAAGTGTAAAGTTCTGTGCAATTAAAAATAATCAGCTTGTCTTGGAACTCAAACG
AATGTAAAATCCTATGAAAATTAAAAAGCAGTACCACAAGTTACCCCAAAAGTCCTT
AGGTCAGTAACTGTTCCTGTTACAGGTAAGAGAGAGCATGGATTAGAGGTGGGCGTG
GGTATCCAGTGGACATGGTTTTGAACCATGCTCCACTACTACTCACTATCTGAGAATT
CTTAAATTTATTAATCATTTCTATATTATAATTTTCTCAGTTATGAAATGGGAAAACA
ATACCTAAATCACATGGTTGTTAAGTAAGCAATTGATTGTTAAGCATTTGGTCATCAA
AAATATTAATCCCCTTCCCTGATTCCCTAGATAAATGATGAAAATACTAAATAAAAAT
AATAAAAATTTAAAGTGAACATCTCAATTCTTATACTTTGTTAATTTCTACATGTATT
ACAAATCTACTAGAAATTACTTGGAATTGAGGAAATGATTACTGCTTAATAATTCTTT
GTGGTAGAGGGAGAGTTGGTATCATATTTATGAGACAGCAGCCAATATAGTATATCT
CAAAGGAAAAAATCCATTCTACATAATGCCAGAATTTAATAGTTAAGCATTTTATCTA
GGTCACAGCACAATAAGCAAGATGGATAATTAAAATAAAAGTATATTTCTCTTGCAT
ATATTTCTCATTTCATGTTTCCCTATCATATTTTATATCTTACCTTACTTCAAATACATA
TATACCTTCAATAAAACTGAGCCTTCTTGCTTACCCAGGAAGTTTCATCATTCAGTAG
AAATAAAAGATGACTTTAGAAATATTAAAATACAAAAATCTACACTGAGGTCTTTTG
AATGCAGGAAAAAGAATTATATCACACACACACGTACACGCACGCATGCATACACAC
ACACAGAACCTCTCGTTCTTTCTTAACATCTTATCAATCCATCAGTTTCACTCCCACTC
CGTATCACCTGACTGTGCACAATATCTCATTGCCACCTCCCAGTCTTCTCCCTGCCTG
GCACCCTCCTGCTCTCCTGCTTCCACTTTAAACACCCTTCCTTCAGCTAGGTCTTTTCT
TTCAGGGATCCTCCCGTTGCTTTCTTATCTGGATCAATTTAGCCTTCCTCTTCTCCACC
CATTAGTGGATAAGCACGACAAAGACACTAGAGTCAAATAATACAAACAGAATATA
CCTTAGATGAGTATGGTGATGAAAAGGATATGGATACTTAGAGTTTAGCACTATTCTC
TCAGCCACTCAGGAAAGCAACGCCTTTACAATCAATAGTGTTTCAGGTACCAATCAA
TAATCTGTTATTGCTATTTTTAAAATCTATAAGGTATCAGTAAAATGTAATTACTAGA
GCAACAAAGATATCTTGTGAAATCAAATTAGTATTCATCCAGCAACTGAGTACAAAG
GTTTAAGGGAGGATAACTACCAATACCAAAACATTTTAAGCATTTTGTTTTGCCTCCT
AAATATCAAATCATGTAAATGTGTGGTACATAAATTAGGAATTATATTTATGACATA
GCTGCAGACATATTAAGAGAAATATGTGCTTATATTTACAAGTATAGTACAGTTCTTT
TTCATATTAGATACTGTTGATGATAATCTGCATATAAAAATGCTCAATATTTTTTCAC
ATTTATAAGCCATAAAATACAGCTAATAAAATGTGTTTCTACTTTCTCATAAACATGG
AATAGTGACAAACAAGGAGCTTTATATGAAAGCACCATTACAATTTAAACTCTCACA
AGGTCATAATATATTGCACTAAGCAGGAGAGTTCAGCTTATTTAAAAAAAAAAATAA
ACTCTAATGAGGTTCTGGAATGCAGAGCCAAAGCATAAAGATGGAAATAAAAGAAT
TGCATGTCTTCTGAACTGACTTGGTTGATGATTTTTTTAAAAAAGGTTTTGTGTCTTCT
GACTTGGTTGATGATTTTTTAAAAAAACGTTTTGTGGTAGAACAAATAAGGTAAATG
AAATTCAGTATTTAGGATGAAAAGTTTTTCTAATTTCAGGAACAACATTGAAGAAAT
ATTGAACTAAGCAGCTTTGAAAGAATCAGATTCCATTTGTTGAAATTTTTCTGAGAAT
GAATTTTTTTAAGACAGTGTACACAGTTGCAGTGTGTATTGGTTATGGATTGTGGCAA
GCTATATTACAACTTACCCAAGAAATAAGGAGGCTGGGCGTGGTGGCTCACACCTGT
AATCCCAGCACTTTGGGTGGCCGAGGCGGGCGGATCACGAGGTCAGGAGATCGAGA
CCATCCTGGCTAACACGGTGAAACCCCGTCTCTACTAAAAGTACAAAAAATTAGCCG
GGTGTGGTGGCGGGTGCCTGTAGTCCCAGCTACTCGGGAGGCTGAGGCAGGAGAATG
GCGTGAATCCGGGAGGGGGAGTTTGCAGTGAGCCGAGATTGTACCACTGCACTCCAG
CCTGGGCGACAGAGCGAGACTCCGTCTCAAAAAAAAAAAAAAAAAAAAAAAAAGA
AAGAAAGAAAGAAGGAAAAAAGTCACTTGAAAAGAATACTGGACTTTGTGTCCAGC
TTGCATAGCTGAAAAGAATAAAAACCTGTCCACTTAAACTCATTGCAAAAAGAAGAT
GTCACTCCTACAAATAGCAAAGAGTCATGAAATTATTCTATCCAGAAAAGTATACAT
TTCATCCCTTTGGATAAATTTTAGAAGTGAACTATGAATACATACGGTGAGGATAGCC
AGCTAAGAAGTCAAGAAGGATTTCTCAAATTTGCTGCTCAGAAAGATCATACTCTCC
ACAAAACAAATAATAGCAGGCTTTCCAAGTCAACCTTGAATCCAGCTTTCCTTTATCT
TTCCTTCTTGTGAACTTTCACTAGTTTACTATCTAACAATGAATTTGACGATAGCCAC
ATACCATCTTATAGCAATATTTGTTATCATATCCCTTGTTATTTATCATTCACCTGCTC
TGCTTGAGCCAGCTACAAGTCACATGTCCCACGCACTTTTTCCTGTTTGATTTTTTACA
GCACTTTGAGACATGTCTCATTATTCCTACTTGACAGGAAAGAAGCCATGGAAAGTT
GAGTGACTTGCTCCTGATCACAAATGCTGGCCAAGGAAGAGTCGAGTTTCAAATCTA
ATGATCTTTCCACTGCACTCTAGATTCCTCATTTTGAACTATTTTTTTATTTTTTGCACT
ATAGACTTTTTTCCACATTTTGAACTGTTTTTTATTTTTTGCACTATAGACTTTTCTCTT
ATACCCAACTATATTGATGACTTCTTTTAGGCTAGAAACTTGTTTCACTTACTTTCCCT
TTCTTCAGATTGCTGCAATATTGGCCAACATGTATTGGGTACTTACTGAGTCAAGTAC
TGTGATTGTGCCAAGTATCTTATAGGAGGATTATCATCCTCATTTTTACAGGTGAGAA
AGGAAAGGAGGTAAAGTCACACACAGCCAACAAAAATGGTAGCACCAGGATTTGAA
ACAAATCAGTCTGACCCAAGTTGACTTTGTTAACCACTGTATGCACAGTCTTCTTAGA
CATAGTAAGAGCTCTAATTGTGTTTGGTGATTTGATTATTATGACAAAGTAAGTAAGG
GAAGCAGGGAGAATTATAAGAAATAAGGCTCCACAACACTTGGCTATAGCAAAGCC
CCTTAAAACTTCAAAAGGTCACCCAAAGAATAAAGATCAGGCTGGGAGCAGTGGCTC
ACGCCTGTAATCCCAGCACTTTGGGAGGCCGAGGTGGGTGGATCACCTGAGTTCAGG
AGTTCGAGACCAGCCTGGACAACATGGTGAAACCCTGTCTCTACTAAAAATACAAAA
ATTAGCTGGATGTGGTGGTTGCCGCCTGTAATCCCAGCTACTTGGGAGGCTGAGGCA
GGGAGAATCGCTTGAACCCAGGAGGTGGAGGTTGCAGTGAGCCGAGATCATGCCACT
GCACTCCAGCCTGGGCAACAAGAGCAAAAAACTCTGACTCAAAAAAATAAATAAAT
CAATCAATAAAATAAAGATCAATTTGGAGAAATTAATGCTTATTAATAAGCAATGTC
TTGCACAGCACTTCAGTTTCTCAATACATTACCTAACTCAATCCTTACAACAACACCC
TATCCCCATTTTGTGGATAAATAAACTCATGTTCAGAAGGTTGAATAAATTATCTAAG
GTTAATAGTTCCTGACCTAGAGCTCAAATCTTCAGTTTCTATCATATTCTTGCCCTTAC
CCTGGGGTAGCTAACATTCACTCACTAGTATTGGAGCTAAAATAAGGGAGAGAACAT
ATAAATGAATACAAAGGAGACATTCACCTGCCTTCTCTTTCTCCTTACATAGAGAAGG
TTGATTATCTGCTATTGTGAAGTTTGCCTTTTGAAGGATAGAAATGAGAAGACTTTCT
TAAATTTTGCCTCTACGCCAAGAAATTAGAGTGGTACCACCAGTAGTTCCATTTTCAA
ACTATCACTGTAGCTAAAGCTATGTGGTAAGGGCCAAGGAAAAGAAGTATTCTTGCA
CTTCAAAATGCACTGAAATACCAGTCAGTAGCATAATATAAAGGAATTTAGTGGAGA
GAAGAGTTGACCTCAATCTGGCTCCAACATCTCGGCTCTTAACCCCTACCCTACACTT
GTTCTTCATGGGGAAGCTAATTGGGCCACTGGAAGATTCAGCAGCTACCATTTGCAG
CTGAGGGACAGCCCCTCCCTGCTTAGCAACCAATGGATATGCATTTATGGAACACCT
GCTAACTGCGACACACACTCCTATGTATGAGGGAAAATACAAAAAATGTTAAAGGAG
ATGCCTTCCCTTGCCCTCAGGAAACTTAAGTATAGTTGCAAAGAAATGATTAGCAGC
AAACGAAACCATGGAGAAGTAAGGGCTAAGGTCTGTGAAACAAGCCTAGAAAATAA
CCTTGTCCTTGAAAAACACAAAAAGAAAGAAAGAAAGAAAAGAAACTCCAAGGCCC
TTGTGAAGGAAACCATTAAGTTTGCTTCACTTCTGTGTTTAGGAAGACACAAACCCAG
TCTTAATGAACCTCAAGGCCACAACTACTGGAGACATTTAGGAATTGTCACCACATTC
TAATGTATATATCCTCTGTTTGGCCCTTCCTATTAATATTTTGTAAAATTTTTGAAGAT
ATGAGCAATGTTTAAAACCATGAATCCCCCTTTTTTTATAAGTAATATTTAGGCTGAA
TAAACAAGAGAAAATAGGACATAAAGGGGAGCCAACGTGTGCCTTCATTTATAATGT
ATTCCCAAGTTGTGAGTTTGGTTTATCAGCAATTTATCATGCCAAATTCCAAGTCATA
TTTATCTATGCAGATCAAACACTTGATTCTATTTTTGCCTTAATTTTTTTATTGGGTAT
GTTTATGACCAAGTCATATGGTATTTTCTGTGACAGATAAAATGCACAGGTTATTCCA
ATCTGGCTCAGCCAGTCATAGCAACATGTAGTCCTTCTCATGTCTTAAGAATGAGTAT
CAAGAATTCAAAGGGAGTTCCAGATGGCATCCAAAAAGCTTACAGTTTATGCATCAC
TTATTCTAACAGTAGAAAAAGAATATTTGAAGCCAAAAATAGACCTTGCATGTAGCA
TGTGGAAGAGTAGAAATTGCCCTGATAGTTAAACAATTTGAAATTCAAGACATTAAT
TTCTTTATGAAGCATTTGTCACATCATAGGTAATATTTTATGCCTATCATATATATACT
TATTATGAAATACAAAGAAATTATTCATTCTATCTAAGACTTTGTATCCTTTACCAAT
ATCTCTCCATTCTCCCACCTCCACCCTAGCCCCTGGAAACCACCCTTCTACTCTCTGCT
TCTATGAGTTCTTTTTTAGTGAGATCATGCAGTATTTGTCTTTCTGTTCCTGTCTTATTT
CACTTGACATAATGTCCTTCAGGCTTATCCATGTTGTCACAAATGACAGAATTTCCTT
CTTAAGGCTGAATAGTATTCCATTGTGTGTATGTAGCACATTTTCTTTATTAATTCATT
TGTTGATGGATACTCATATTGATTCCATATCTTGGGTCTTGTGAATAATGATGCAGTG
AACATAGGAGTGCAGATATCTTTTTGACATACTGATTCCACTTTGATGGGATATATAC
CCAGTAGTGGGACTGCTGGATCATCTAGTAGTTTTATTTTTTTTTATTTTTTATTTTTTT
TATTTTGAGACAGAGCCTTGCTATGTCGCCCAGGCTGGAGTACAGTGGTGCCATCTAG
GCTCACTGCAATCTCTGCCTCCTGGGTTCAAGCAATTTTCCTGCCTCAGCCTCCTGAG
TAGCTGGGATTACAGGCACGCACCACCATGCCCGGCTAATTTTTGTATGTTTAGTAGA
GACGGGGTTTCACCATGTCTCGAACTCCTGTCTTCAAGTGATCCGTCCACCTCAGACT
CCCAAAGTGCTGCGATTACAGGTGTGAGCCACCACGCCTGGCCTAGTAGTTCTGTTTT
TAATTTTTTGAGGAGCCTCCATACTGCTTTCCATAATGGCTCTAGGAATTTACATTCC
ACCAGCAGTGCACAAGGATTGCTTTTCTCCACATTCTGGCTAACCAGTCTCCTGTCTT
TTTGAGAACAGACATTTCAACACGTGTGAGATAATATCTCATTGTGGTTTTGATTTGC
ATTTCCCTGATGATTAGTGATCTTGTGCCTTTTTTCATATAACTGCTGGACATTAATAT
GCCTTCCTTTGAGAACTGTGTATACAGGAGAAAATAATCACTTCTCAGAGGAGCTTTC
ATTTCAAAATATCCGGGAAAAAAATAGAAAAAATGGAAAATTTATCCTAGAGTAAGT
TGTCTTTTATATTTTGACCCTGTTTGTGACATAAACTGGATGATACAAAACTGGAATG
CAAAGGCTTTAGGAGGATTACTTACTTACTTGTATATTGCTTTAGGTTGTTTGCAGAA
AATTATACTAATTGAAGTTCAGGCTATGATGTGATAAAATCTATGTCAGGAGATGAG
TCTACATGCAAAGTTTGAGGAAGTGACATTTGAGTTTCAAAACAAAAAAGCAATTTT
CAATGTCATATCTAGGTTAACCCAAAAGATTTCTTTCACCCTATTTAGCTGCCTCTAA
GATGGATGCTGAGGATAATTACACTGTAGAACAATAGGACGATGCTTCACACTCACC
TCACAGGCTCTGTTATTCCCACATACTGCCAGAGATACTCCAAAATAAAATCACTGCA
ACATCAGGCAGTTATAAACCTCAACGGTATTATTTTCTATTTATATACAGTATATTTT
ATATTTTACAAGTATAAAATAGAATATATTTATTCTATTCTCTTTGACACAAAGTGAC
CATAAGACATATTACTTAAGTATGACTAGCAAAGTCATGGGGCTTGTCATTCAGGAG
GAAACTCTTAACTAACTGTTCAGTTTTTGTTCACTGCACCATTTACATAAGCCAAACT
AATGCTTCACACTGTGCAAAACAATGCACAGTGTTGTGAATGAATGGCTAAAATAAA
ACTCTAATGAGTGGGGTTTGAAAAATGCAACTTTAGAAAACTGTTGAGAAAATGTTG
CACACTGCGCATTTTACAAAATTTCGTTGAAGGACACTGGATATTCTTTTTAGGATTA
TGGAGGGAAGCAAAATTTTGGCTCCTACATGCAGTTTTTGTGGCCTTTGCCTGAAATA
GTCATCTCCCATTAATTATTTAGATATCATTCATTTCCTAAGACAACATTTAGGGAGA
CTGCCTTAAGTACAATTTGTACACTACCCAGATAAGAATTCTTTTTGGTGAAACATCG
ATAAATATTACTTGGCAGTAACACCAAGTTAAAATATTTGTTTCACAGTCGACGTTAA
TAACTATTATAGATAAAGTGAATTTTATAAGACATACTCAGATCTAAAACAGCAATA
TGGAGCTCTTCAAATCCATTGAAACTTCATACCAGCCTACGGAAGTAGAGGTTTTTAT
GCAAACTCTTCAAGAAATATGCTCTGAACTTTTAATTCCTTAGATTGATAGAGGAATT
AAATCATGATATAACTAATAGGTTTGTGGTACAAATTGCTGCTGCTTAATCTGACTCT
GTGTCTTCCCAGTGTTCTATATGAATTAGATATTCCATTATCTAAAGACAATCAACCC
CATCCCACGGTGATAGCTCTAGGACTCCCTTTGAGTTCATTAAATCTGTATTCTCAGT
CTCCAAACTTCTGGTTAATTCAAACAGAAAAGTCAACTGGCCCATGAACTAAAATAA
AGTCATCTGAATTTTTTTTTTATTTTGCAGTGTGATAAAAGTCTCGCACTTTTTATTTC
TGAAAGTTTCTGCTTTCACTGAGAGCATAATAGGCTATCCACCCTTATGCAATCTTAC
ATACAAAGTCATAGTCAGGCTAAATTCAAAAACACATGTGAGATAGAAGTCAACGTT
TATTTTCTGGAGAAAAGCCACACATTACAACAAAGTGAACAATGAAGCTGGCATCCT
TATCACTGGTGACCAAAACATTTGTGACTCTGGACATTGGCCCCACAAATGCGATAA
ACATTCTGCATAGGAAGTGAGTTTTGCTAATTAAAAATGGATCCAAAATACTTTCTAC
TCTTCAGCCAAGAATTAAAAAGTAATAGGGAGGAATTGAAATCACTTGGGTGCTACA
TTGAGCCATTCTGGAGAAGCAATTCAGAGAATGTCATGGCAGCCTCAAATTGCTGCT
CAGGAGCATCCCAGCTTAGAAGATTGCAGGAAAGGAAGAGCAAAGTCATTCTTACAT
GAGAACTGTCCTTAACCAGATGAATAGACTCTCCATTTTTTACCCTGGCTTTGTCTCA
TTTAAGTCCCAACCAATCTAGCTATCATTTTAGGTTTTACTACCTGCTAGTATTTAGGA
GCTTAGGGGGATAAAAAAATCCCTCAATACTCAGAATTAGACTTGGTGATAAAAATC
TTGACACATAAACAGAATAAAGCGCTTTCATTACTCCTCTAAACCACAGTGTCATTTG
GTCTCTATCAAGGACTGTAAGAATTTCTTTCATCAGGGGAAAGAAAAAAAGGACAAG
AGCCTGCAAGATGTAGCGGAACTCTCATTAAACACAGCAGGAGCTTTAACTGGAATC
CAGAGTAAGGTGAGGTACCAGGTTACAACAATTTACTGCTTTTATTACAATTTTGATC
ACAAGGACTGATTCATGTCATCTAGTTTCTTTTCCTTGTCACTATCACTGGTGCTAAG
AATACATCAAATTGAAATTTAAGAGCCTCATATGTTTCTGTATAACCCAGTGATGGGT
TGTACTGCTTTGACCTTCTTAAATGTCCCTTTATTTCATTTGATATCCATTCCCATAGA
AAAACTATAATGCTTTGGTTGGTCAAAATATTAATCTTTCAAAACCTCCCTGGCTTAG
AAAACCAAATTTTTGTAGAGAGAGATGGGTAGAATCTAATTTTATTCTAAAGCAATT
AGCATTACATCATCACAGCAGAAATATCTAGAATATTACCTCATGTCAGTGATCTTCT
GATATGTTAAAAAGGGTATTTTAAAATCTGAGTTATTTCTTTTTCTTTTTAAAGTTACA
TCATTAATTACATACTCATCAACCAAAATATTTTATGCTCCAAATTTGAACCGATATA
GTATGTAAGAAGTGTTCAAAATGAAATTATTTTGGTCTATTTTGTCTTTGAAGAAGAT
CACAGGGATGGACCTCCCAAAAGGATTTTTAAATGGGATTACATATCTGACTTTTAA
AAAAAATTATCTGACCTTGAGTTATAGTGCCCCAAAGTAAGCAAAGTTCCAAACACA
CAGTATCATCAGAATTGAGTTAAAATTATCACCAGGGGCTTAATTTCTGAAATTAAA
AAGGAAATGTTATTTCCTTATGAAAAGAAAAGGAACCAAAAATGAACTTCAAGGTAG
CTGATTTCTGTCTATGTTAAGACTTAGGTAATGGGAGAAAGGGAAAAGGAAGGACAG
AATTAGGAGAGGAGCAGTGTTTAACAATTGCGGGTGCAAGACTCAAGTTTTTTAGAA
TCCATTAGCAGAGAACCCTATTTCTCCCATTAACTGCTGTCCTTTTAAATCCTGGCAC
CAGCTCTGAGGACTGCAGGGTCCATAGCTAGTGCCCCACTCTACCCAGTTTAAAGAC
ACCACTGCCTGGAAATGACAGGGGTTTTTTTCTTAAGGAAAGAGGTGCTTTCTGCCAC
GTATATATAAATTGGTAAGCTTCAAATAAAGTGCTTTTGTCCTTTCTGTCTATCAGAA
ACTGTGCAAATCGAATTGCTGTAAAACCAAGGGCAAGAGACATCAATCCTGCATTCT
ATAGCATCTGATTTTATCCTTTATCCCCAGGCACATTTCAAAAGGAAAAAAATGAGGT
TGCATTTAAATTGAGTATTTGGGACTTGCCAGGAAAACCTCCCGCTAGACTAATATGA
TTGCAGGGAAAACAAGAGAAAGGAAAAGTGGAGAGGGAGTGTGCTAACAGATCCTG
GGCCTCGTCAGCAGAGCCGTCCTGAGCACAAGGCCATGGTCAGACATCTGGTCCCGC
GAATGACGTTTTCTTTATGGTCATTAAGAACACCAGTGTGTCGGGACACAAACAAGT
ATTCCTTTCAGGGATTATGACACATTTTCTCCCAAAGTAGTATATTAATGACATTTCC
AGAGCATTCTTTACTATCTTTTATATGTGATCAGGAAGACTAATACATATCACTACTT
CTTTTACACACAGCATTAGCCAAAACTAAAGTGTCAAATACAATTTTGCCTAGGATG
AATAAACAGAAGAAATTTTTATGATACTGCACTATCAATTCCAAATTAAATAACAAC
AAAATGATAAGTGTTAAAATTCATATTAATGATTGTTCCCACACAAGCCGGAAAAAA
TCTTTCTAAGAAGTCTTTCATGAGTTAATCCCATCTTTCAAAGTGTTCAGTGGCTCCG
AATTCAGTTACTGTTTCCTATCAGTTCTTCTTTCATTAAGTCTCTTCCCTTTTTTTTCTC
TTTGCACTATTTCCCTTAGCCGGGTACATAATCTGCTGTGCTTTATTCATTTGTGTCTT
AAGTTTGTTTCCCGATGACATACCTTTCCAGCAACGCCATCTGGGGAGTTTGGGCAAC
TGTACCACGTTAGGAGGAAACCCTTCTTCACAGGAGAGTGTGCCTTTGCTGCAGGGA
AGGAATTAGGATTTGCTTGGACTGTGGTTGCAGCTGGCTTTTAAGGATCTCCTTAGAA
TGCAAGCAACTCATCAATGAGAATCTCTGCAATGGTTGTCACTGGGTAGAGTCATGC
TATGTGGGGTCATAGCCTTTGAAACAAATAACAGTAAAGATAAAAATGCTATTAAAG
GAATCACCACCCACAGAGGTTAACTGGGTTTTGTCCCCAGACCACCTCGAACAAGAA
AGAACATTTTTATCAGTCATTTTCTTAGTTTTAGCTGATAAAACAAAGTACCATAGAC
TAGGTGGCTTATAAACAACAGAAATTTATTTTTCACAGCTTTGGAAACTGGAAGTCTG
AGATCAGGCCGCCAGAATGATCAGATTCTAGTTAGGGCCTACTTTGCTTTTGCAGACT
GCCAACTTCTAGCTGCATTTTCATGTGGCAAAAGGAGATTGAGCTAGCTCTCTGGTCT
CTTCTTATAAGGACACTAATCCCATTCATGAAGGCTTCACCTTCATCATCTAATTACT
CTCCAAAGACCCCACCTCCAAATACTATCACATTGGGAATTAGATTTCAAATACAAA
TTTTGCGGGGACACAAATATTCAGTCCATAATAGTAATGATTACTCATTATACATAGG
GCTCTAAATGTGCTAGCTTCTGATAGTTTTTACACTCACTTCTCTTTATTAGCTTGTCA
AGCATAATTAGGGCAGTGGCCTTACTGAAAATTATTGAATTTAGTTTCCTAAGGACA
GATATTGAGGAGTTTTTTCTTCACTAAAAATTCACGTTCCGATACAGCTTTCATCTGTT
ACTACTTTGTGAGATGGAAAATCTTTTATTTTATTTTTATGTTTGGATTGACCCTTCTT
AATAAAGTCGGCATGTAATATGCTTCATGTGTTTCTAATATGTGCTTAATTTTGCAAA
ATGTTTTGCATACCAGAATGCATTTCTCTTCCAAAAAAGGTACCAGCCTACAAAACCT
TGCTGTTACTGTTTTCAATTAGTTCATGGAATTAAATGTATTAAATGTTTTATGCTCTG
GCAGAAATTATGATTCTCACTTAACTCCATATAAATCTGGATCTGCCTGGGCCTTTAT
AAGTGACACAATTTCATTAACTGAATAAACAAATGATACAAAGAAATTTGGTTTAGC
CTTCTAAAATTCCAAAGGCGTTCAACAAAATATCTCAGAATGGATGTTCCAGGACTTT
TATGGCACAGGACAACATGTATTGCTTATTTTAAGAAAATAAGCTAAATAGTGAGGG
GATTCTTTTAGCAGATCCTCAGGATGTGTTAGGTTGAATCATAGGCAAATGATATTTG
ATCATTGCACCTGTTAACACATTGAACCTCATCCTAAAATTGTAGAGCTAGAAGAAA
GCCTTCTGGCAGTTTTTAAATAGATTGATTTACTGCAATTTATCCAGAAGCTTCACCG
TTGTCACTGGCTACATGTGACTTTGGCCTCTGTGGGGCTATATCCTCATTTGTAAAATT
GGTGGTGAGGTAGGTGGACAGTTGACTAAATAATCTCTTAGAATAATTCTAGTATCT
GTGGATCTAAAGCATCCAGGGGTTGAATATGTTTCTTTCTGGCCAAGAAAAGATGCA
CCTGTCAATAATGCCCAAACTCATCTTCTGAGAATCCTCTTTCCCAAGATACCCACTC
TCCCTTGGGTTATATTATAGTAATGATCAGAAGCCCCTGCCAAGAAGAAACTGTTAA
CCTGGGAGGTCTATATTTTATTTCACAGCCATCTGTTTATACTTTCTCACAAGTTAGTG
CACAGTATACCCATCATTTTCTACCATTTTCCTTAATTTATTAATTTTACTAATTGCAT
AATTAACAAAAGTAAGAAGATTTTACCTCCTTATCCCCATCTGGTAGTTTGCAGATAC
TTGGCCTGATGACAACTGACAGTGATGAGATACTCACCAAGTTTACCAGGGCAGGAG
GCTTCCTAGAGAAAAAATGAGAAAATGAAATGGGGAAGGGGAGTGAAGGATTGAGG
AGGTGACAATCTGGACTCTTGCAACTGCATGGCAAGGTTGGCACACAAGCTGGGTTG
CAACGGAGGGAAGGAGATCCTTATCAGATGTAATCAGAGCTCAGATCGAGGGCTTTG
GTGTGTGTAGAAAGAGGGAGAGACAAAGAACTTAAAACAGAGCTGCCATTTGACCTT
GCAATCCCATTACTTGGTGTATACCCAAAGGAGAATAAATCATTCTATTAAAAAGAC
ACATGTGCTTGTATGTTCATGGCAGCACTATTCACAATAGCTAAGACATGGAATCAA
ACTAGGTGTCCATCTATGGCAGATTGGATAAAGAAAATGGGGTAAATATAAAGCATG
CAATACAACATGGCCATAAGAAAAAATGAAATCATGTCCTTTGCTGCAACATGGATG
CAGTTGGGACCCATAATCCTAAGTGAATTAACACAGGAACAGAAAACCAAATACAG
CATGTTCTCACTTATAAGTGGGAGCTAAACACTGAGCACACATGGACATAAATATGA
GAACAATAAACACTGTGGACTACTAGAGGGGGGAAGGAGAGAGGTTTGTAAAACTA
CCTATCAGGTGCTATGCTCAATACCTGGGTGATGGGATTTACACCCCAAACATCAGC
ATCATTTAATATTCCCATGTAAAAAGACTGCACATATACCCCTTGTATCTAAAATAAA
ACTTGAAATTAAAAAAAAAAGAAAGAAAGAAAGAGGCTGGAAATAGAGGCTCACAC
CTGTAATCCCAGCACTTTGGGTGGCCAAGGTGGGTGGATTGCTTGAGCCCGGGAATT
CAAGACCAGCCTGAGAAACCTGGTGAAACTCTGTCTGTACAAAAAATACAAAAATTA
TCCAGGCATGGTGGAGCGCACCTGTAGTCCCAGCTAATGGGGAGGCTGAGGGGGGA
ACATCACTTGAGCCCAGGAGGTGGAGGTTGCAGTGAGCTGGGATCACACCACTGCAC
TACAGCCTGGGTAACAGAGCAACTCTGTCTCAAAGAGAGAGAGGAAAGAAAAAAGA
AAAGATGGACAGATAAGAAAATGCACTTGGAGATTAAGAGAAAGCAGCAACATAGG
ACCCTGGATAATGTGTTTGCTTAATAACTATCCTGATGAGTTATCTGACTATTCCCAA
ATGAGTACGTGGCAATTCAGGCTGAACCATCAGAGTAGCCCTCCGGAATCTTACTTA
TGTACAATAGACCTGCATGCACATTTACTAGAATGAGCCTCTCTCTCTGGTAATCATG
TCTGCTTCCACTAATTCCATCTGTTTCCTCTCTCTCCCTCCTATCCTGCTAGATCTTAAT
TCCTTCGACCTTCCTTTGTTTTTCTAACTCCCTTTCTTTCTCTTGTTATTTAACCTGCTA
TACTATGCAATTGATCTCCTCTGCACTAAGGAACATGCACTTCAGAATTCTGTTGACA
TCTTGCATTCCTTTATATTTAGTGAAAGAATGCAAAGGAGTCTACCTGGCAATATTCA
CTCTGCAGGAGGCAATAATTATTATTCAAATTAAAGGAAGCAGTAAAGAGAAATTCA
GAAAAAATGAAATATACTAATCTTCAGCTTTTCATTTCAGCCTACAAGGAAAAAATG
AAGGAGCTGTCCATGCTGTCACTGATCTGCTCTTGCTTTTACCCGGAACCTCGCAACA
TCAACATCTATACTTACGATGGTGAGTAACCTAGGATAGACATACCCCTGCTAGCTA
GATCATTTGGAAAGGTTGACATATATTTGTTTCTTACAGCTCCTGATATAATTACATC
AATATTTTGTAGCTCTCACTATTGACTTGCCGTGTCTAGCTATTATGTCCAATTGATTA
CCTATTGCTGAAAACAGTTTGAATTTGGTGCTAATAACAACACATCAATGTCTGTTAA
GAAATGTGGATGGATTCTTATTAACAGCCACATCCAGCATATCAACATCCACAATAT
GTCTAAGGTCTTTCTTTGCAAATAATTTAATAGGCTAAGCCATAATTGGAGTAGATCA
TAATTTGTAAGAAAATGCTTTATACTTAGAAAACTCAAGAGAAAGAATCAACAACCA
TAATTGTTTTTGCTTTATTGTAGTCTTTATAAAGTTTCTATACTTTGTATATACATGTC
AACCAGCTAATGATAATAATAATTGGCTCAATAAATAAAACTGACTTACGACTGAGG
CCCTAGATAAAGAGGGTCTGAAAAGAAAAGCCTAAAGAATTAGCATGGCAATTAAC
ATGATTGAGGTGCAACTCTTTAGGTTTGATTTATCCTGATTCATTTTGCTTACTTTGGC
TCTGCCACAATCCACATGATCTTGGTCAAATAGATACTTGGATTCTCTAAGTCTCATT
TAACTCTAGCATCTTCCTCTTGGAGTTGTTGTGAGGTTTAAACGGTTTAATGTAAGTC
AAATATGCAAAACCAAGCCTAGCTCATTATATCACTCTACAATGATAGCTATCATTAT
CAACATCATCCTTACCTAATTCAGTCAATTTAACTAAAATATTTTATACAGTTCTATGT
ATCCTAGATATCCCTAAGGCATATTTTACTAACTCTCAGGCTCACAAATATTTTTCTTT
TCCATATATGTAAAGAAAGACATTAATGACAAAACAAACTGACCTTGTGGCAGTTAA
CCCCTTCTGCACCTTTAAAGCCTATTCAAGGACTCAAAGGCATTTACCTTCCAAAGTT
ATTCTATCGTAGCACAAAAATCATAAATGCTAATTAACTGTTCCATAAGGAAATGTCC
TCCATGTGAAAGGAATTCTGTCTCCAAACAAAACATTCATTAGAATGCAGGGCCAAT
GCCTACTTTGTACAAATTCATTCGGTCAGCAAATAAATTAGACAGACCTTTATTATTT
GCTAGATGTAGCTGTGAAGAAGGATCCAGCTATGTTTCTTATGAGACTAATGTCGAA
CTATGGGTTGTCACTGAGGATCCAGAGTTCCATAGGGCGTAGTCCTCACCTTCAAAG
AATTCAGGGCTTAGTAGAAGAGTCTTACACAAATGACTAGAATGTAGAACACAGAGT
GGTTAGGACAAAGGAGCCAGGGATGGTTTTTGCTGGGTTAGGGAATGAAAAAAGGG
GAAGAAAATATGTGAAGTTATGTGTGAGCTGATTCTTGAAATAAGCTGTTTTTATTTG
CCTGCGTTCTCTTATAATCCTTTTCCATAGGCTTCCATAATTTTTATTGAGCTGTATTT
AAAGTTGAATAGATAATTCAACATTTCTCGTAAACTGTGCTTCCTAAAAGAGTCCGTA
GAGAATTTCAAATTTCTGCAGTCTTTAACTTGACCTGGTATTTCTATGTTAGATAATA
ACGTGACTTGTTTATTGCAGGCAAACATTATAACAATAAATTATTATTATTGTTTACA
TTTGTAAGCACTAAGTATATGGCTTGTGCTTTGCATTCAGCATCCTTTATCATTTAATC
TTCACAACCACCTTAGAAGGAAGGTACTCTTTTTATTTCCATCTTTTAAATGAGGAAA
TAAAAGCATAAAGAAGTTAATTAACTTACCTAGTGTCACACAGCTATTAAGAGGGGC
TTACTATTTGGATGCAAATATAGGCAGTTCTAATTCCAGAGCCTCTAATCTAAGGCAT
TTAAAACCCCATCACCTTATCAAATAAGCTGTTTTTATTTGCCCGTGTTCTCTTATAAT
CCTTATCCATAGGTTTCCATAATTTTTATAAAATTGTATTTAAAATTTAAGTATAATCT
TGGATGCCATCAGGAAAATGAAAAACATTTTTACATTTGTGAAGGAAAAAGCCCACA
TCATTTCCAATATAGTTATTGAGTTAGTATTATCTAGACTATCTATTAGCAGCTAAGG
ATCTGAGGTCAAGGCCTGCCAGCCTGGCATTTTACTTGACCACAACCTCCATGTGCAC
TAACCAGGCTGCTAAAAGAACATTAACGGGAACATAACCTGCTGGCTTGGTTGCCAC
AATTTTAAAAAGACGTTAATAAATTAGAGAGCACTTAGAGGTTAGGAAATAATATGG
TGGTAAAGATCTAGAAACAGTGTCATTCTGGGGCACTTGAAGATGTTTAGCCTGGGG
GAACAACTTGAAATGGAACATAACTGTTTTCAAATACTTGAAAAATGGTGGTGCACC
ACAGAGAATGGCCTAATCATGGGTAGCTTCAGACTTCAAACAAGGATCAGTGGGCTA
AAACCAGAGAGATGGAGTTTGGGACTCAAAGAATGCTCATCTGAAATTGAGGGCTGA
CCAGCGAGGTTCTTTTAAAAATCATTGCATTTTACTAAATTGTGAGTTCTGTAATTAT
AAATGTCCTAGCAGGTGCTAGCTGTCATCTTTTCTATTATAAATTATACTATTTTATGT
TATAATTTGTATTATACAGGCTTAAAACATAAGGGTCTGATAATCTGCTTATCTTTAA
TACATAAGCCACTGATAGAAAATAAGTGGCTAACCATTCTTCAGTTCTTTTTTTAATT
GACAAAAATTGTATATGTTTGCGGTGTATGGCATATTTTGAAATATGTATACATTAGA
GAATGGCTAAGTGAAGCAAATTCACATATGCATTACCTCACACACCTGTCATTTATTT
GTGATGAGAACAAAAAATCTACTCTTTCAGTGATTTTCAAGAATACAGTACATTGTTA
TTAACAATAGTCAGCATGGTGTACAATAAGTCTTCTGCGGCCGGGCGTGGTGGCTCA
CGCCTATAATCCCAGCACTTTGGGAGGCCAAGGCTGGCAGATCACGAGGTCAGGAGT
TCGAGACCAGCCTGACCAACATGCTGAAACCTTGCCTCTACTAAAAATAGAAAAATT
AGCTGAGTGTGGTGGTAAGCGCCTGTAGTCCCAGCTACTCAGGAGGCTGAGGCAGGA
GAATTGCTTGAACCTGGGAGGCGGAGGTTGCAGTGAGTCGAGATAGTGCCACTGCAC
TCCAGCCTGGCAAAAGAGGGAAACTCCGTCTCAATAATAAGTCTCTTGCATTTGTTCT
TCCTGTTTAACTGAAATTATGTATTCTTTGATCAACATCTCCCCAGTCTCCACCCCTAA
CCCCTGGTAACCACAATTCTACTCTGCTTCCGTGAGTTCAACTTTATGAATAGTCCAC
ATGTAAGTGAGATCATGTGGTATTTGTCTTTCTGTGCCTAGCTTATTTCACTTAGCATA
GTGTCCTCCAGGTTCACCCATGTTGTCAAAAATGACAGGATTTCCCCCAACTTTTTTA
AGGCTGAACAGTATTCCATGTGTATGTGTATAAATTAGATTAGTAGATGTTGCCACTC
CCTCCTCCACCACAGTGGCTCTATCCCTGGCTCCTGGCTCCAGCCGAGTACACTAGAG
GAGGATATTCTAAACAGCAACAACACAGGAGCAAAGACATTACAATGGGGTGTTGTC
TTATTGCCCCCATTAGACTGTAAGCATCTTGAAGACAAGGACCCCCATCACAGAGTG
ATGTTGTCATCCCTGGAGTGGGCACTGTGCATGATTGATGACTGGAAGCAATGAACA
TACAGAAGGGCAAAACAGAAATCAGCAGGATGCTTTGCATTTCAGCATTGACTTTGC
CAAATATGCCCAACTGTTCAGGGAGTTACATTGGTTCTAACGAAGCTCCTGTGATTCC
TAAGCACAGGAATGGTGATAATATATATAATGGTGCATGCATATATACGCATATCTA
GATAATGATATCTCATTATATGTGAGAACTGAAGAACTCCGTTATGTTTCTCGTCTAA
CCAAAAAGGGCCTACAGCTACGATAATTTCCAAACAAATAAATCTGTGCTACTTGAT
TTTCATGCAAAGCTCATATTTGTTCAAAAGGAAAATAAAGCTTAATTTAAAATCAATT
TAGGCTATTTTTATCTAAGTATGCTTACCGTTATTCAACTCCCTGCAGATATTGTCAAA
TTTCTCAATATGGTAAATATTTATTCTGTTAAAATATATCCATAGTTACACTAAAGAC
AGAGAGGTCTTATATGTTCTAAACAACATAGAGCAAATGCTCATAAACAGCATTTTA
TTCCTATCTCCCGGAATAACAACGCTACTTCCAATTGCTGGAATCTAAATTATTAAAA
TAAACCCATGCTGCAAGCTTTGTATGCTTAACATTCTCAAATGTTCACTTTTCAGATA
TGGAAGTGAAGCAAATCAACAAACGTGCCTCTGGCCAGGCTTTTGAGCTGATCTTGA
AGCCACCATCTCCTATCTCAGAAGCCCCACGAACTTTAGCTTCTCCAAAGAAGAAAG
ACCTGTCCCTGGAGGAGATCCAGAAGAAACTGGAGGCTGCAGAGGAAAGAAGAAAG
GTAACTTTTTCCATAGGTTTTCCTTCTCTCTCTCCCTCCCCTGCTCCTCCCTCTCACACA
CTCGGGCACACATGCACGCACACACACACACACACACACACACACACACACACACA
CACACATACAGAGAGCAATGACAGCTGAACCTGTGCCATGCCAACATGTATAGGTTT
TCAGTAGACACAGAGCCAGGCTAGTTGGGGTAAAAACTGTAAGATAGATGCTAATTT
TAGGCTAGCCAAACCAGAGCTCTCAGAAATCCAAAGAGCTTCAGTGCTCTAGTGCCC
CTTCCCGTATATTGAATCCCCTTATTATAAAAGCCTCCCTTCCCTAGACCATCAGGCA
GAAGCACTGTAGAGAAAACACAGCCCTGGCGAACTCCAGTGGTGGGGAGGGGAAGA
AGTGCTGCTTCCTCCCTCTCAGGATCTGTGTCACCCCCTTTGTCAGGCGTGGTTTTCCT
TGGAATTACAAATTACCAGATCTTCCCTCCAAGATCTTTCCTGCCCAGGGTAAGGGCC
AAGAGCTTGCCCCTTTCCTCTTCAGAGTCCCACTGCCTGCCCTGGAAGTTGGTCCTTC
CAAGATCAGGACCTTCTCTGAGTTCTTTGAATATGTTCTTTATCTTTTTCTAAGACTTG
ATGGGGATTTTTCTCTTTTTGCCATTGGTCCCTGCTTATATTAAAGAGCTTTCCTTTTG
CCAAATCTTTACTTTTCCATAATCACATGGCTAAGAAGAGCCAAGGGTATTATTTGAG
AACACTTAGAAATCCTAGGGACTGTGTACACAAACAGAAGTTGTTTGAATGTGTCTG
TTCCAACCATGTGGTTATGGTAGTTAATCCCATCAAGGTACTCACGATCATCCAAAAA
TGGAATTCTTTTATGTAATTCATCCCCACATTGTATTTCCCAATATTTTTTATGATATA
ATTTTAGAATCAGGTAATCACTAAGAACATGTTCCCTGCACAGTTTTATGATGTTTTC
TCTAAAAAGTCAGCCAAAACTTTGGACACTTCTATGTTGGATAATTAAAAACAGAAT
GAAGATAATCCTCCTCCTAAAGATTGAATTCTCCAAGAGAGAATGCAGGACAAACAC
AGATGTGCTGTGTATAGTATATGTGCATATATACATGCATATATGTACACAAATATGT
GTATTATCAAATAATGAGGCTCAAACATTAGAAATCCTTAGATTAAATTTTCTAAACA
AGAAAACACTAATCTTTGTAGTTGAAAAAAAATCCTCCTATGATATGTAATATGCTG
ATCTCAATTTTCACCTAAGAGTGATGTTCTCCAAATGTCCGATGAGCATGTCATATAT
ATATATATGAATTTTTATATATATAATTACAATGGTAATTGGTATATAGAGATATCTA
TATTATAGATATATATAGCTATCTCTATATATTACATATACCAATTATAGATATAAAT
ATAACAATGGTAACTGGTGTATATGTGATGTGTATATATGTATATGTATACCATAATT
ATATATTAATATTGTATATATGCCATAATTATATATTAATATTGGTATATATACACCA
TGATTATATATTAATATTGGTGTGTGTATGTGTGTGTGTATATATATATATATATATAA
AATACTAGTTATCATTGTTCTAGATTTAAAAAACAGGAACCTGAGCTACTAACTCGAC
TATATATATATATATATATACAGGAAGTTGCTTTAAAACATTTTTATCAGCTTTTTTAT
TGTTATTTTTAGCTTTATTCTCATAGTAAAGCTAAAATAAATTATTCAACATTATCAA
AACTTTGCTGCCAGCAGATGTAAGCAATACCTAAAACAGTGGAGAGCATGTTGCACC
CAAAGCAGTTTAAGCTCTGACCCAAGCACTGGCATCTTATAGGCACTGGGTAGAGAT
AAGAGTCATAGGTCGACATATATTGAGATGCTATGACTTGATTAGAATATGGAGTCA
GTGACTGAGGTGAAATTAAAACTCAAACCACAATTCAACATCCTGATTTAGGATGTT
GCTGGTGTTTCTAGGTACTACACTTAATTTGAAAGAAATTATTGAGGATAAAAAAAG
AACTGGGATCAACAAAATTAACTAGGTGTTCTTATAAGAGTCCCTGAGGTTACTAATT
AATGAAACTGATAAAGCTCCTGCACCCTGACAGCAAGAAATTATCAATGATTATACA
TTTAAACAATTGAATTGAACTAGAAACTGGCCACATGGTTAAAAGACATTTACAAAT
GTAATCATCCAGTGTTATGATGCCCAGAAAAAAAAAATTCCTTAGAATGCTTTAAAA
GCCGTATTCCATCACCTTTCCAGTTATTTGTTAAACATTTTGTAATGCAAAAATAACC
ATATAGATTATGCCCTAGTGGTCGGGTTTTATTTTTAGTTTTTTATGGTTTTTTTTTGTT
AATGGTAGAGTTTTAATTAAAAGAAAATACAACTAATTAGCAGAAAGTGCCAACTTT
AAAAAATCACTAATTGATTTTATTCTATTGGGTTATACTGACTTAATTAGCACTAATT
TAAAGAACTATTAATTATCTTTAAAGAGTCTTTAGCAAGTGCATATATCTCAGTAATT
ATGTTAGTAAGGACATGCCTATAACCAAAACCCAACTCAACTAGTTAAAACAAAAAG
CAAATATGTGACTAAAAAGTCTAGGAGTGGCTACAGCATCAGGAACAGCTGGATCCA
GGGATCACAGTATTATCAGAAAACTTTCTTTCAGTGCCTGTCATCTCTTCCTGCATTTA
ACTGGTTTCATTATCAAGAAAGTTTAATTTCAATAGTCAGTTCCAAATTATTTTTCTCA
CAACTTAGCAACTCCAGCAGAAACAGAGCTTCTTTTTCCCAATAGTTTAACAAAAGTC
CCGAAATTGAGTCTCAATGGCCTGGCCTGGATCACAGGCCCAACCCAGAACCAATCA
TTATGGCCAAGAGGATGTAGTAGTTTGATATGCTAGCCTGAATCACATGCCCACCACT
GACCTGCAAAGGATTTTAGGTAAGATCCCTGGGGTAAGAATTGTGGAGGGGTAGTTC
CCCAGAAGAAAATCGAGGTGTTCTCACAAGAGGAAGGGGTAATGGATCTTAAATAA
ACAAAACTATAGATGTCCACATTTTCTATCTATAAATGTTTAGTGTTACTATAACAAT
TAGAATAATTATTTAGTTCATACACTATTCAATTTGTATCTCCCTTCTGTTGCCCTGTT
GCCGTTATTTTCTTACAGATAGAATGAAAAATATTAATCTAGGCAGCTCTGTGAAACA
GTACTGTCCAAGGAATATAACGTGAGCCAGGCCGGGTGTGGTGGCTCATGGCTATAA
TCCCAGCACTTTGGGACGCCGAGGCAGGTGGATCACCTGAGATCAGGAGTTCAAGAC
CAGCCTGGCCAACATGGCAAAACCCCATCTCTACTAAAAATACAAAAATTCGCAGGG
CATAGTGGCGAGTGCCTGTAATCCCAGCTACTGGGGAGGCTGAGGCAGAAGAATTGC
TTGAACCCAGGAGGTGGAGGTTGCAGTGAACCAAGATGGTACCATTGCACTCCAGCC
TGGATGACAGAGCAAGACTCCATCTCAAAAAAAAAAAAGAAAGAAATGTAATGGGA
GCCATATGTGTATTTTTAAATGTTCTAGAAGCCACATTTTTTAAAATAAAAGAAATAT
GAAATGAATTTTAGTAAAATATTCTTCACCCAATATATTCAAAACATTATTTCAATAT
GCATGTAATCAATATAGAAGTATTAATGAGCTGTTTCACATTATTTTATTCATACTAA
GTGTTTGAAATCCAGTGTGTATTTTACGTTTACAACTCATTTCAATTCATGTTAGACAT
ATTCCTAGTGCCTAGTAGCCAAAGGCAGCCAGTAGCACAGATACGGATATTAAAACA
GAAAACACCTAGTGAATAATGGGGAAATTTTAGGCCTAAGTTTTTAAAATCCATACC
AGATAATTATTCAGATTCAAATTTACTTTGTTTTTTCATATATATTCTTTAAAAATTAC
ATTAATATGGGAACTCAGAAAGTTCAAAAGAAATTTCCATTCTATGGTTTTAGTCTTT
ACATTGTCAGAACTAATGCAAGTGTGAAGTTTAGGATGTACTGTAAGTAATAGGATC
TTCTAAATCTCATGCCTTCTTCAGCTACCTACTCTGTTTCTATTTCAGTTCCTCACTGT
GGGGAGGGGACTTCTCTGAACCTAGGTTTCATCTCTCACTCTCGTTCATGGTAAACAG
GTTTTCCTTTGTGGCACCTAGCACAATTAGTAAGTAATTAGTATTTACTGGCATATTA
GTATATATATGCATATGTATTTATTTAACCCTATGTCTTCTACTAGATTATAAACTCCA
TGAAGATAGAACTTGTCTTTTGTTTAATAGTGCTTGGCAATAGTTATTACTGTAAACA
TTTTTTTTCTTTCTTATTCAACTCCTGTTAGTCATTGCCTGAGTACTACAAATGTTTTTA
AGTAAATTAATAAATAATAACTTTCAGGGCCAAATGTGAAAGCGGCAATATATAGCT
TGTTTTGATTTTTTATTCCACCCTCCCATCCTAAAACAATTATAGTCACTAAGTTTCCA
AATGACATCTGAAATTGCACTAAGGAAATCCTAGTCTGGGCAAAATCACTCAGTCAA
CAGATATTTATCAAGCACTTACTATTTGGCAGGCCCTGTTCTAGACACAGGGGATACT
CATCAAACTTACATTCCAGTGGGGGAGAAAGAGCTAATAAATACATACACAGCATAT
TAGATGATGCAAAATTAGCAGGACAAAGAGAACTGGGGGTGTGGGGGTGAAAGAAG
CTAATATTATATGTTATTATTACTATATATAATAATATAATTATTGGATAGTCAAAAA
AAAACCTCTTGAATAAGACATTTGAAAAGAAGCACAAAGGTAGCAAGGGAGTAGGG
CGGGCAGCTCTTCTCTGGGACCTGAACATTCAAAATGATGAGAGCAGCAGGTGCGGA
GGCCCTGAAATAGGAATGTATGAGGTGTGTTTGAGAAATAACATGGAGGCCAGCGTG
GCTGAAGCTGAGAGCAGGGGGAGAGTGGTAGCAACTGAAGTCAGAGGTCACAATTA
AGGACTTTGACTTCACATGAAATGGGAGATCATGAAGGATAATAAAGCCATTTCACT
ACTTTATGTGAATCACAGCATCTTTTTAAAGAAGTATCCTTTTTTAAAGGGGGAGATG
ACTAGAAAAATAAATAGTGTTAGATAAATAGAGAAAACAGGAAAACATTCTAGACT
AAGACAGTGATTCCAGAACTAAGGATCCACAGAGGCGAGAATGCAGAAAGTGTAGG
TTTCAGAGCAGTGGGTAGACTAAGGGTTTGGACTAGTGGATTTGGATAGGGAGTTGG
AGAGTAGCGAGGTGGGATTAGGGAGGGCTGTGAATGCCAGGTTAGTGTGCAAACTCC
ATTATATAAGCAGTAAGGAGTCACTACAGACTTTTCAAAAATACATACATGTTCCAC
CTGGCCCACGGGTTAGCAACATTTTCGTTGCCCTGGACCCATTTCCTTCCCAATAAGT
TACAGGTTTGTGAAGATTCTACCTAGCAAACATATTACTTTTAAATAACTATTAATAA
ATTATCTTACCATGATTATAATCAAAGGAATCTGTAATTGCTAATTATTTCTGATTATT
AAAAGATAAGCAGTATTGCACTAAATTGACATAATTCTAACTCAAAGTAAATATACA
GATAGACATGGCTATAGATGTGAAATATGATTTCTGTTAGGGCTTTTTAAATTTAAAA
AAACTTACGAGTTCTCCTCCCTCCCCCTACCCTTAATACCTTGAAGGCCTCTTTGTGG
GACTTCAGGGACCCCTTCAGGGAACTATGACCTAGGCTGTATTTGGGGGGCTTTCTGG
GTTTATAGCTGGAAGGCTGCCACAGAGGCATCGCCACTTGGGCTCAGATTCACTTTGT
GTTCAATGTTTTGGCAATGTCCCCACCTCCCCATTCCATCTGTTGACACTATTGCAGC
ACTGACCATCTGGTTACTAGGTTGGAGGATACTCCCTCGGGCTCCTTTGAACCAGAAT
TAGTGCTCCAGTGATTAGATAATAGAAGAAGCTTGTCATAAAAAGAATAAGCCCTTT
CCCTGCTTTTTCTCCATTCTTTGATTATCGCTGGTAGTCAGTGATGATCATCTCTATGA
GTCTATATCAATCTCATCAGGTCAGTTTGAACCTCATCTCTTGAAATCAAAGTTTCCA
TAATGCAACTGACCCACAAGGGTGAAATGACATGAATGCTTTAACCATCCATTTATC
ATTTATTCATTCATTCAACCAACATGTATTTAGCAAGAGGCAGCAGAGTTAGCATAAC
TATACATCCCAGTTGGCCCAGGACAACTCCAGCTAACTCTCGTTGTTTTGATACCATT
ATTAATTATTTCTCTTTACTCTCATAAGTGTTCCACTTTGGACAATCAATTACATGAGC
ATCCTTAGCAGGGCACAGTGTTTAAGGGCATCTTTAAAATATTGTCTTTAAGAACATG
TGGTTAAGAGAATGTCTGTGTTCAAATCCTGGTTCCACCACTTAAAAGCTGTGTGACC
TCAAGCAAGTGACTTAATCTCCGTATGTCCTCCTTTGTCAATCTGTAAAATGAGACTA
GTAATAGAACTTATGGAGTTAGTGTGAGAATTGGAAGGTTACTCTACAATAAAGACA
TATAACCAGCATGGTAAAAGGGTTAGCAATTACTATGTGAAGAAGCATCCAGTTTCT
GACCTCACAGAGATTATCTAGCAAACTCATGATTTTATAAAGAAAAGAAGTTTCTCA
TCAACAGAGACTGAAATGCTACCATACAATATACGTTGCTTTTTTTTTTTTTTTTTTTT
TGAGACGGAGTCTCGCTCTGCCACTCAGGCTCAGGCTGGAGTGCAGTGTTGCCACCTT
GGCTAATTGCAACCTCCACCTCCCAGGTTCAAGCAATTCTCCTGCCTCAGTCTCCCAA
GTAGCTGGGATTATAGGCACCCACCACCACACCCAGCTAATTTTTATATTTTTAGTAG
AGACAAGGTTTTGTCATGTTGGCCAGACTGGTCTCAAACTCCTGACCTCAGGTGATCC
ACCCACCTCAGCCTTCCGAAGTGCTGGCATTACAGGCATGAGCCACCATGCCCGGCC
AATATTTTTAAATATTATAAAATATTCTTTATCAAATTGCATAGAAGAAAAGACAGTT
TGATAGGTAATAGATATATAAATAGGTCAGGCCAACTAAAAGTGTCCTGAAAAAATT
AATATTGTGAAAACAAAAGGATTTTAATGACATTGATAAAATCTCACCCTAAAAGAG
ATTAAATTAAAAATCACCCTACTTGAACCAGTTCAGTGAGATTTCATTAGCATGCTCT
CATTACTGGCATAATCAGCTTCAAAGTCACTAAGCCTCTGAAAGGAAGATGTGTTGC
TTATTCTTAATAAAATGGCATAAAAGTAGATCATTAGTCACCAAACATGATAGACTT
ACCTTTTCCATTTGTTGGCATCTCACATTGTAGATGGCAATTAAAATGGAATCCAGGG
AAAGAGGGGGTGGTTTGTATAGCAATGGATTATGAAACAAAGTACTGGATTATTCAC
CGCTTGACATTCAGGAAACATTCTGCTCCTTACAGAATATGGCACGTGGGCCACAGA
ATCTTCCGTGTGCTACCTTCTCGGTGAAGAAGAGCACCCCCAAGTTTCTTTTCCTAGG
AGCTAACCACAGTAAACCCATTACACACTTTAGCAGAAGGGCTCATTCTAAAGGTCT
TAGGATTTTAATCATTTTAAATTTCCTGTTATGCTTCAGGCTCTTCAACACAAAGTGA
ATATTGTACTCTTTGGTTTTACATAATTATATTCAATTGTCATATTTCAACAGGACATT
ATTTGTGACTTTAGATGGGTCAATAATGATTTTCATTGTCAGCAGTAAAGTCAATAAT
TACAGACACATCACCTACCCTACTTGTGTAAAAGCATTTTTTGGTACTAGGAGATTTA
GTGTCTGATCAACGGTCCTGGATAGCAAGTAATATATCCCCCAAATAATGAAAAGTG
ACAAGAAAATAAATATGTTTACTTCAGAAATAAATGGAAAATTAGTGCTATCTAAAA
TGTAGTCTTAAGTCTCATCTGTGTACATAAAGTAAAATGAGTTTTATGTACTAGTTAC
TCAAATTTATCTTCCACTCCATTTGTATAGTAATTAAACTCTTACACTCAGTAATATAC
AAATTGGTAATTAACCTCTTTGCAAAATGTTAAAGTGTTCCTAAATGTACAATAAGTC
TCCTTTCCTGTCTCATTGTTTTTCGCTTCACGTACCTCTCATGTAATTATTTCAATGATT
GAGTTCAGTGTGAGGAGGTTTATGCCTAGAAAAGGTGCTCACCAATAACGTGCCTCA
GTTCCCATAATAGCAAGATCGAGAAGGTTCTTTAGTCTCCCGGAACGTCACGTTGAA
CATCTCAGTTCTATATTTTGCCTTGACATTTGCATTATATCAGCTGATCATTGTCTTGC
CCTAATTTTCCCTTTTAATATTTTAGTGACCTTCTATGTTAGGTACAGGTTATTTAGAA
GTGTTCCTCCAAGGCCAGATACTTTTTCCTTGAACAATTTATTTTTAACAACTTTTAGC
GATTTTCTCACTTCACCACCCTCCGTTTCATAAGTCCACGCAATCACAATTCCTTTCTG
CTAATCTGCACAGTCAAGATATAAAGTAAGAATACCTATTTGAACATGTAGTGAGAA
CTTTACTTCTCTGCCAAAAATGAAGGAAAATGCTGCCACTTTTGTATGTCACATGTTT
TTTATTCTACAGCCTCACTCACTTCATGTCATGTTTTAGTGCAGTTTTCTGGACTAACT
GCTTATTTTCTCATTGATTAAACTGCCTATTTGCTCATTGGAATTAGAGCCAATTTTTT
TCCTTGAGGGTCTGACTAGAAGATTAAACTATGTTCATGTGAGAATCAATTTCTACCT
AAGAAATGAGTTAGAGGAGTTATGGGCAGCAATATCTATCTGGATGCTACACTGTGA
AAAAGGAAGCGAGGTTATGCCTTTCTACCCCAATGGGGTAGCAGAGACCTCAGGAAC
TGAGGTAGATGCCCCCCTGGTTATTAGCGCCCCTGAATAATTTGTTCAAAAATTGACT
GCTGGACAGGTGTCGTGTTGCACGCCTGTAGTCCCAGCTGTGCAGGAGGCTGAGGCA
AGAGGATCTCTTGAGCCCAGGAATTTGAGGCTATAGTAAACTAAGGTCACACCACTA
TACTCCAGCCTGAGCAACAAAGCAAGACCCTGTCTCTAAATTTAAAAAAAAATATTG
AATGCTTATGAATAGAGACTAATATAGGAAGTCATAAGTATTTCCTTGGGATAGAAT
GCTTTCCACCATAATTGACTTGACATCCTGTATTTTTGTATGTGTGGACTTAAGTTTTA
AATATTTGAAACACAGACAATTATTAAGTCCTGCAAATGTGTGAGTTAATAGTGGAT
ATAACATTCCCTTCCAGGGTGTAAGAAAAGGTACCACAGAAGTGAGCAGCCCTGAAG
CACAGCCTGGCCTAGTTTGGCAGGTCTCTGTGAGTTAGCAGCAGACTCACGTGACCA
CACTCTGTACTGCCTTCTGTTTCTGTTTCACCCCATTAATTGTGCTAAAGAAATGCACT
TGACACCTATGCTGTGTAATCTCATTTAGCCCCAATAGCAACAAAAGTACTAACCCCA
TTAAATTGAGTCATTTCAAACTGAGCCAAATGTTGCACTCCAGTAAATGGAGTAGGC
ATTGGTTATAATGGGAATTCTCCATTATTCATAATGGAAACCACAGGAGTTTGTTCAT
GCAGATCAAATGTGTCCCACCAAGGCAAGAAGTATGGAAAAGTGGTGTTGCTGTATT
ACCTTGTAATTTCAAAGCCTTCCCGTCTGAATCTTATTTCCCTGCTGTTTCCTCTTGAC
TTTGGTTCTTTCACAAAGGAAAATTAAGAACACAAATATAAACATTAAGTTAAAACA
CAACTGAACAAAGTGCCAAACTTAATTGGAGCATCTGAAAATGAAACATTAGGCAGT
TGCAGTGGCCTCTTGATAATAATTCACAGTAACTCTCTGTAAGCTGATCCTGTCTGAA
GAGCAGCAGGCACAAGGCCCCTGGCCATGAAGTCCATCTCAAAGGGCCAGGCTCAG
CAAAGCAGGATGCAAACCCAGGCTTTCCAAATACCAGGTTGGGGCTCATGTCACTGT
GCCACAGGAGCTTCTGTAGAAAGGCTACTTGAAAAAAGTGGCCATTAAAAATCCAGG
TGGATCCTATCTAGGGCAGTGTTGGAAACACTGATCTATGGGAGGAGGAGCAGGAAG
GAATTGTTTAACCACTGAGCAGAAATGTTACATTGCTACCTGCCTTTAGCAGCTGTGG
CTGATGGGTACCAGTTGCTAAGAAGAGCATTACCTAACAGTGTATTAAGATAGAAAA
ATGATTTTAAAGCACGGCACTTAGAGAATGTTGAAGTTTTACTTTGCTTTATTTTGATT
TGTTTGGTTTGACTTTGTCTCCTGGAGCATCCTCCATGGATTTCTGTTCATTACAAGAG
AAACCTAGGGCTCTAACCCAATTCCTAATTCTTGGACACATTGCACCCTTGTTTTGTG
ATAATCCAGCCTTCTTCCTTGAGAAGGTTTGCTGGACTGGAGGTTACATGTATTGAAT
TTTCTAAAATGAAGGTGCAAAGCTGTCTCCTCTTATTTCTTTGTGGTGCTCACTTCACT
GTGAGATTTCCTATCAATACAGCCCAAGTCAGTGGGCATGCATGAGGTGGAGATGAG
GGAGTTAGGAAGGACTTGGACTCTCATCAACCATCAGGATCCCTGAATCCACTAACT
GTTCATAATCAAAGAAGTTTGAACAAATACTTCACACACATGAAATTGCCAAAATTT
TGCATTTGAGTTGTTATACCAGTAAGTCCAGTTGCCATCATCTCCTTGTCACAAGTGT
CTTAAATTTTGCTTTTGATAATAATGATTACCACTCATTCAGTACTAACTTACTTGATA
TTAGACACTGCATTAAATACCTTGCAAACATTATTTTGTTTGATCCTGACAACCATAT
GAGATAGGTACTATTCTTATCCATTACCAAAAAAATTAATTTCATGAAGACTTTTCCC
AGAGAGAGAAACTTTAAATATTTACACACACACCTCTCTCCCTGTAACAATTCCGTAG
TCCTGATAACAGCAAATAAGCAAAGTCTGTGTAGGATGCTTTACCAACAGTCCCACC
TAGAGGCAGGAGAGTGAACCAGCTAGAAAATATTTTATTCATATTTCTTCCAGAAAG
GCTCCATTGGAGTTTGAACTCAATTTATGTTATAATTTTCTTATTATTTTTGTATTGGT
TTTCCTGAAACCAATACAAAGTAAGAAAGCATTGGTTCCACTAAAAATGTCCTAAAA
CCAGCCAAGCACAGTGGCTCACACCTATAATCCCAGTACTTTGGGAGGCCGAGGCGG
GTGGATCACTTAAGCCAGGAGTTCAAGACTAGCCTGGCCAACATGACGAAACCCCAT
CTCTACTAAAAATACAAAAATTAGCAGGGTGTGGTAGCACACACCTGTAATCTCAGC
TACTCAGGAAGCTGAGACATGAGAATCGCTTGAACCTCAGAGGCAGAGATTACAGTG
AGCAGAGATCACGCCACTGTACTTCTGCCTGGGTGACAGAGCGAGACTCTATCTAAA
AAAAAATAAACACATAAATAGTAAAATGTCCTGAAACCATTATGGGGTTAAAGCAA
GAGGCAGGGCTGGTTCCCAGGATTTTCTGTCTAATCTCCAGTGAGCCACAGACCTATT
CCTGATCAACTTGAGAATAAACACATCAGTAAAGATGTGTAAGGCTGTCTGACTTTC
CCATTTCTGTAGAATTTTATTTGAAGAGAAGTTTCTCCTTTCTCCAGGCCCCATATTGT
TTATACAAAAAGACCTTTCCAGTAAATGTCCACAACCACTACCATCAACTAAAATGTT
TTCCCACTAATGCTTTCAATGGTAATCAGTATTTAACAGGGCACTTAGGATTATTTTTT
GATCAACCATTGTTTAGATATTCCCACTTATAATTACTCCTGTGAAGGATTGCCTCGG
GGCATCAGCTGATCCTGAGAAATTATCCAGAAGCCATGAGTGTGTAATAATTTAGTC
TTAAACCTAAATAGGTCAGTATTGGGTGGGACTTTTCTCAGCTGCATAATGGGGAGA
ATAAAAAGAATATGGAAAGAAGTTACGTAACACATCCTGGGTCACAAACAGAGGTA
AGACTTGAACACAGGCCTGACATCAAAGCCCATGCCAGTATGACTTACAAAAGGTAG
ACTGGACTACCTGCATTTGAGTCACTAGTGATGCTTATCACTGGGCCTCACCAAAGAA
CCTTGGAATCAGAATCTTTGGAGGTAGATGCCAGGCACCTGCATTGTTATCAAGTGCT
CCAGTGATTACCATTCACTGTACAGAGCCAAACAGACTCCTGATGCTGGAAGAAAAT
TACAGTGCTCAAAGTGCAGGGCAGGGTGTACATCTGGATCTAAATCACTGAGCAACC
ACAGGGTTTCAAGAGAGGGTCAAAACAAGGACTTTCTGCTCTCTGTGGCCAAGGGGA
CACTAAGTTTGCACTGTTCTCAGATCTCCAAAGAGACTTTGGTGTATGGGGGATAGG
GAGGGGGGAAGGGGGTGTGAAATAAAAGGAGAAAGTGAATTTGATTATTTGATTGA
TGAAAATTGAAAAGCTTATTGTAGGGCCTAGCCTACAGTTGATGAAAAAACAATGGA
TCAGGAAGAAGATCAGAACTTGTCTCAGTCCTCAACTGTTTTCCTCAGGCTTTGGTTG
AATATTGCCATCCTGTAATTCATTATAGCATTTTCTGTTGCATAAACGCTTAGCAACA
AAGCCTTTTTTTAAAAAAATTTGTAACTCCTCAATGAGGATTAAATGCTTCTTCTTCTA
AGACAGTCCGAAATATACTCACAGCTGAAAATTCAGCTAACCGCATTTCCCAACTAG
CCACATTCTATAGAAAACTCTAAGCCATGCAGATGAGTACAGACTTGACAATAGTGC
TCAAGGCTGGGAGTACTATTCATCTGAAAAGAATGCTCCCTCCAATTGGTGGGCCGTT
ATTCTGCTAGGTTTGTGTTTGGATAATTATAAGATGGCTATGTTTTTCTTCCCCAGTCT
CAGGAGGCCCAGGTGCTGAAACAATTGGCAGAGAAGAGGGAACACGAGCGAGAAGT
CCTTCAGAAGGCTTTGGAGGAGAACAACAACTTCAGCAAGATGGCGGAGGAAAAGC
TGATCCTGAAAATGGAACAAATTAAGGAAAACCGTGAGGCTAATCTAGCTGCTATTA
TTGAACGTCTGCAGGAAAAGGTAATCTCAGCAGAGTCCTGAGCAGATGGATATATTC
ATATGCAGCACAGCTGGGTGAACTTCCATATGCCTGAGCACAGAGACGAAGTCAAAA
TTTGCTGCAGGTGTGAGGACAACTAACTCCCATGGGCAGGGTCTCACAGTGTAGCAT
TGAGTTAGCAGGAGGTGCAACATGGTAGAGAAATGGGAATCCATCATGAAAGCTGG
AATTTTGTCAAATTTTCCCATGGTGAGTGGATTCAGGGAGGCTGATTCATGCTTTTGA
AATGTGTAAGACTTCTATACAAGCCTCACGAGGCAATCTGTAGGAAAAATGTTACAC
TGGAAATATTAATGTCTATATATTATATTGATATAAGTATAAATAACATTTGATTTAA
TATTTGTTTAATATATGACATTAAATATATATTTAATTAAAATATTAAATTAGAAAAA
TATATTTGCCAGAAAAGGCCAGGGTATTTATGAACACTGGTAAGCCCATTCTAGGGT
ATAATAGCATCACATGGGACCATAGCAAAGATTAGCTCATAGGGGATGTTTCATCCA
GTTCTGGTATCCTGGTGCCCTTCTCTTCAACAACCTAAACATATATTCATTCCCATGA
GTCAGGAGGAGCTGTGCTGGAGTTCTTCTGAAAAATGCTGTCTTTCACTTTTGTACTC
TCTATGCTGTCTCCCACCTATCCCCTCAAAAAACCTTTCCTTTGAAAATATACAGTAT
AGCTGTGAGTAGTTTAGCTGTGTCCGTTTCCAGAAATTGGAATAAGCATTGAGAAAT
GGGATGTTTGAGAAAGACGCCTCAATCCTTTTCTGAGCAGTCAGTCACCCTTCCCGCC
AGTAGCAAGTGCCTTTGTGTGATAGGCATTGGAGATGCAGAGCAAAACAGGAGTGTG
CCTGTCATCAGAGCCCTGAGAGTTTAATTAGATGAGCCTCCTGTTTTCTATTTCTCAG
AGTTTCATGTCTTCTGTTAGAGATGGCCCTTCTCATCTAAGGTTCAAAAAACCTTATC
CTGAAGTTCTGATGATTCTGTTTTCATTCTCAGTCTCTGACTGCAAATATCCAACTAG
AAACAAAGGAAATCAGGCATGAAAACTTTTAAAGATATAATTGCATGGAGATCTTCA
TTTGTGCTCGTGAGGAATTTTTGAAAGCATTGCTGGGGAAGGGTGTGTGGGCTCTGAT
GCAGCAGTAAGACACTGAGGCTCTCAGAGGTCCGTGGACGAGTACTGCTGACTTGGG
CAAGAACCGGAATAGTTACCTGATGCCTTATCCGAAACATGAAAGTTCGGATTAAAT
TTGTATTTATAAGCTAGTGTTTTTATACTCTCAGAACAATGTCATTGCGTTTCACCCAA
GTGAGTCAAGTCACGATTTGGAAGAGGCAACAGAATTTGGCTCTCTCCAGGTGATTT
ATGGCGGTATAGGAACACATGTTTTACTCAGATACAGGGGAGCAAAGTTCCATTTGC
TAAAGTTTACTCCCCTGACCTTCAACCAGTCAGTCTTCCTCCATCTGCCACCACTTTGC
ACTTCTCCAGAGAACTAAGGATGTTCCCGCTTGACCAGTGCTCATAACATGGACAGC
AGAGGGCCACTGTGTGATCTCTTTGAGATCACTGTGACTCAACCTTCTTCTCACATCC
TAGGCCCTAAAACAATTAAGTGAAGTTGCTAGGAACGGTACCTGCTGATCTTATTGC
AGCATTCTCAATTAGGCCTCAATGCAAGATTTATATCACTGGCAGTCCTGGAGCATTT
TTGTTTTTCAAATTACACATACCCAAACACACGGCATAGCCTCCTTTTTTGTTTGTTTG
TTTTTTTGAGATAGAGTCTCGCTGTGTCGCCCAGGCTGGAGTGCAGTGGCACGATCTC
AGCTCACTGCAACCTCTGCCTCCTGGGTTCAAGTGATTCTCATGTCTCAGCCTCCCAA
GTAGCTGAGATTACAGGCGTATACCACCACGCCCAGCTAATTTTTGTATTTTTAGTAG
AGACAGGGTTTTGCCGTGTTGGCCAAGCTGGTCTCAAACTCCTGACCTCAAGTGATCC
ACCCACCTCGGCCTCCCGAAGTGCTGGGATTACAGGTGTGAGCCACCGTGCCCAGCC
AGGGCATATCCTTCTTGATTTCAATTGTAAAATAGTTCAAAAATTTTCCATATTTTATC
TAATATTTCCAGAAGTGCTAGCTTTTAACGGACCATTTTTTTCCTCTGTGTGTTTTTTT
CTCTTCACCTAGCCCAGCCATGCTCAGCTCATTTTTGTACTCTTTCCACTCCCAACCAA
ATTTAGTGCCCTCCCCCATACATGCATACATGTACATCTGCACACACCACTTTTCCTGCA
AATAATCAACCCAAAGAGTGCTTAAAATTCCTGACATCAACCCACAGAATCTCCAAG
GATGGGACCCAGCATCCATACATTTTAAAAACTCTCCATATAGTTCCAATATGCAGCC
AGATTTGAGAACTAGTGGTTCGTAGCCTGTTCTGATTTAAATCTCAGCTCTCAGCATG
CTATCCCACGTCACATAATGCAGCCCAGAGAAATTCTAGGACCACATTTTTTTCTGGT
ATTTCATAGCTAATGAGGTGCTTTTCAAATCTAATAGGATCTTTGGCCAGTGTCAGTC
AAGATCTTTTATCTCCTCAATAAAAAGGAAATACCATATTTACTTTGATTTGATGTAT
ATCACATAGGTGGATTTAATACAAAATTGTGGTTTACATATTGTGAATGTGTATACTA
AAACTACTTTGCTTTTTCCTAAAATAAGACAAAGTTTTATATTGGAAGTAATATTTAG
CATTTTGTTTGAATGAAGTTACTCCTATTAAATTAGAAATTTAAAAGAGGGTCAGTAA
TAACAGTAAAGCCAAAAGGCATGACACTGCCAACGTAACATAAGCTGCTCTGAAATC
TACCATATCAAAAGATAATTATGCTGGGCATGGTGGCTCACACCTGTAATCCCAGCA
CTTTGGGAGGCCAAGGCAAGAGAATTGCTTGAAGCCAGGAGTTCGAGACCAGCCTGG
GAAATATAATGATACCTTGCCTCAAACAAAAATTCAAAAATTAGCCAGCAGTGGTGG
CACACTTGTAAAAATGCCTGTAGTCATAGCTACTTCAGAGGCTGAGATGAAAGGATT
GCTTGGGCCAAGGAGTTCGAGACTGCACTCCAACCTGGGAAATATTGTGCCACTGCA
CTCCAACCTGGGAAACAGAACAAGACCCTGTCTCTAAAATAAAAAGAAAAAAAAAG
ATGACCACTTCTGAAATGACACCTATCAATGAGTTAATCATTCAATGAATATGTATTG
AGTCCCTACTATATGCTTAGGAACCTTTGTAATATCATTACCAACCATGTCTTTCCCA
ATACAGACAATACAAAATTCAGCAATAAATAATATAGCACCAACAATTAGAGAATA
AGACAACATGTAGTATGGTCCAATATAGACAGTAAATACAAAGACACTGAATAATAT
CAGTAAAAGTAAATTCACATCAAGGTCACTACACCATGCGCCCACCCTTATGATAGC
CCTCACTGGCCCTATCAATTAAGCAAGAGACATGATACAACTCTGTGCAAGCTTTTCC
ACAATCTGCCTACCATTCAGCACTCAGTCGCTCTTCCCTTCAATTAAGAGAATTGAGC
ATTCAAGCATATTTTCACCATGATGCCCATAATGGTATCTTCAATGTCACTGACTGAT
AAATTCCCAGAAACCCCTCAGAGCCCCAGCCATGTTAGCTCAAAGCCTTTAGCTAAA
ACTGAAAGCCTAAAGCAAAAGCAGCCCTGGCTGCACTTCGGAATCTACTGGACAGCT
CTTTAAGGGATTCTGATTTAATGTCTGGAATAGGGCCAAGAACCTTGTATTATTTTAA
AGGCTCACTAGTAGGCTCTAATATTTAGCCGTGGTTGAGAACCACTGTGCTAAATGTT
TCTTAAATATGCTTTGTGATGTCATCATAAATTATATTTTAGTATTTTTTGTCTTTGTTG
CATAAGTGTTCTTTCTTCCTCCAAAGAAGAATGTTACACTCATTTCTTATTTCAGTTTC
CTGTTTTCATAGCACCTCATCTTAACACTCCAGGCTATTATATAGAAAAGAATCAAAT
GTGGAGAAGGCTGTGGGAGAAGGGATGCCTGTGCCACAAAGGCCTGCATTAGGCTG
ACCTATTGATGTCATATCCAGGACTCAAAAGACTAGTCTGTGGATTATGACTGGTGA
AGTTCAAAATGTTCTTATTCTTAGAGTGGTATGAGAAGTAGAAAGAGAGAGAAACAG
AGAAGGGGAGGAGAGGGGAAGAGAGGAAGATGAGAGAAAGGAAAGAGAGGGGGA
AACACCTGTTCTTGACATACAGGAATGATTCAAGACATTTTCTTCCTCCCCTGATGTG
TCCCTTTCTCCCCTAACGCACTATGCAGCATCCTGCAGAAAATTCACCACCTGACCCT
TTTAGAAACCCTGAGTAGTAGGAGCGCCAAATGACCCAATCAAGAATTGCAGTGAGA
CAGTTAGTTTTGAAAAATCAGTTAAAGCATGTATAATCATTTTAACAACAATACATCT
ATTCACTAAACATATAATTTTAATGTCAAATATTTACGTGTAAACATATTGACCAATC
TTTCGATGTAGTTGGGCCCAATACCTTTTCCAAAAATTGATCAGTTAATGGGGGTTCT
ATGGGGGTTTCTTTTCTTGCCATTATTCACACTTATGTCACATTAGCTATGATTTGCAG
TTTTAATTTCTTTAAAATTGAGTAGGGACTAAAGACATCTCCAAAAAGCCTGGATATA
GACTTTTTACAACTTTTCCATAGCTTTTATAGTTGACTCACCCAGTATCTACTAAATAC
TTCACTTTCTCACGTATTTCCAAAGGTTTCTCTCCACCCTCACAATTTTCCATTAATGT
AGTACTTAATTAAATTAGATAGTTAAATTTTCAAATGTGAATTGCTAAACAGGTGTGG
AAATACCATTGGCTATAATCAAGCATATAACACAACCATTTGAGAAGGAAAGTATGT
GGCAATATTAGGGAAGAGCCCTTTCCTCTCAAGCAATTCAGCATTTAGGAACCATCA
GACAGCAGGACGATGGAGGGAACAGAGAGGGTTAACATGGCAAGTTACTGAAGAGG
ACTTCTACTGAATCTTGTTGAATTCCCCACTTAATCCAGATTGTATCATATCTTCTTTC
TTTTGTAATTCTACCATATCATCTTAGTCAATGCCAAGACTTCTGAGCTCATAACATG
GTAACAAATACCAAAGGAGCTTTCAGTATCGTTTAGAAAGGAGAGAAGCAAGTAAC
CCAGACAAACTTGACAACTGCTTTCCCCTATCCAACCATGAAGTACAGTACTTAGGA
AATAAAAGAAATTGCTTCACTATAATTCATCATTTCACTTCTAATATCTAGAAAATGT
CAAATGAAAATATTATAGCCATATTTTAGTGGCAATAGTAGCACATAATATGATGCA
ACTTAAAATGATAAAAATATTTTCAGGGAATAAGATTCTGTGATTCTTTCCCTAAGAG
GTAATTTTGATAATATGTACCTGTTTTGTAAATGTCAATAGTCTTGGGGATACAGGTG
GTGTTTGGTTACATGGAAAAGTTCCTTAGTGGTGATTTCTGAGATTTTAGTGCACCCA
ATACCCAAGCAGTGTACACTGTACCCAATATGTAGTCTTTCATCCCTCGCCCCCACTC
CCAACCTTCCCCCACAAGTCTCTAAAGTCCATTATATCACTCTTATATCTTTGCATACT
CATAGCTTAGCTCCCACTTATGAGAACATATGATAGTTAGTGCTCAATTCCTGAGTTA
CTTCACTTAGAATAATGGCCTCCAGCTCCACCCAAGTTGCTGCAAAAGACACTATTTA
GTTCCTTTTTATGGCTGAGTAGTATTACATGGTGTATATATACCACATTTTATTTATCC
ACTTGTTGGTCAATGGACACTTAACATTAGTTCCATATCTTTGTAATTTCAAGTTGTGC
TGCTATAAGCATGCATGAGCCTGTGTCTTTTTCATATAATTACTTCTTTTCCTTTGGGT
AGATACCCAGCAGTGGGATTGCTGGATCAAATGATAGTTCTACTTTCAGTTCTTTATG
TTTTCCACAGTGGTCATACTAATTTACATTCCCATCAACAGTGTAAAGTGTTCCCTTTT
CATCACACCCATGCCAACACCTATTGTTTTTTGACTTTTTAATTACGGCCATTCTTGCA
GGAGTAAGGTGGTATTTCATTGTGGTTTTAATTTGCATTTCCCTGATGTTGACAATATT
TAACTCTTTAGTTATAGATTCCAGCTATTATCAATTTACACCTATTGCATTCTTCTCAT
CTTTTGTTTTCTTGTGATTCTGATGCACAAATATCATTTGTGCAACCACTTACTGTTGA
ACATGTCTGATGAACACTTACTATTGAACATGTCTGATGAATGAATAATGAAATAGG
AAAAGGGATTAAAACTAGCCTTTATTAATTGTTTGCTATAGGCCAGACATTTTTGGAT
GTACTATCACATTTCATCCAAACAACAACCTAAAAGAAAATACTGTGATTATCCCCAT
TTCACATCTAAGGAACCTGGTCTTTAGGAAGATTAAGTCATTTGGCCAAGATCACAA
GTAGACCACAGAGACTAGATTTGAATGCAAGTCTGTTTGACTCCAAACCTTTTTACTA
TCTGCCCATGACCCCTGATCACCAACATCTCAATGTATGAACATGTGCTTTCTTAGCT
CACACAACTCACTCCTGACCCCTTTTTTATATTGCAAGTGCATAGTCATTAGTAAAAA
GAAGGATTTTTGATGATACTGACCTCATCTTGAATTTAATTAGGCTCATATGACAGAA
TTCCATAGATGGAATTGACATCCTAGGTCATATAGTCCAAGTCCTTGTTTATATTTGA
TACCTAGTGAGATTAAAGGGACATTAAAAAGTAAAGAAAGGAAAGACCTCATATTTC
TTACCTTCCAGTAGAGAAATCTTTCTATGAAATCAGAGGAAAGAATTAGAGGACCAG
AATTTTTCCTAAAATCAACTTTCATACATCTTTTTTCATATAAAAGGCATAGCTGCAT
ACAATGCTAAAATATTGTATTACATTTCCTTTATATTGATGGGAGGAAGGGGGTAAAT
TGCAGAAAACATTGTAAATTTAGATATGCTTGGGCCTCTGACAGTGCCTAGCAAATA
TCAGGAGATCAATAATGAAATAAATATTATCAAAGAGTAGTCTTCTTGATGAACCTT
CTCTGAGTATCACAACTGCTTTAGGAACCTCTAGATTCAAGGTCTAGTAATTGCAAAC
AGTGAGCTGATAAGAAAAACAGACTGTATGGGAAATTACATGCTTCCTGCATGACTG
CCTTTTGTTCTCCCACATTTTGATATAAAGTCACATTAACAGTTCATGAGTAAATATTC
GATAATGTGAACGTAAAGTGTTCAAATAATAGAGTGACTAAAATGCCTGAAAACAAA
TAATTTTTAATTAGAAACTCATAATCATTTATTTTCTCTTTTTCCACATTATCTCAAGC
TCACAAATTATATTTATTCTTTCCTATGGCAAAATCCATTTTGTTAACACTAATTTTGA
GTTTAACAAGAAGTGTACTCCAAAGTAGCCTAATAATACTAATTATAATGTTTCCTGC
TATGTTATCAGTTTGAATTTATATGAATCTTTAGACTTGAGGCTTCTTTTTCCTAGCAT
AGTGATGGTCTGGGCTTTTTCTCAATTTTTGCCAGAGCTCAGCTCTCACTAATTAGTTT
CTTTCTGCATGAGAAAAAGATTTTGCTTCATCTTTTTCCTTATAATAGCAGAACAAAA
AGAAGAATCAGCTGCATCCATGCTAATTTCCCCTGTGACATTTCCAAACAGGATTTGA
TTTCTCTATGCATGCCTCTTTCCTTCTCTTCATGGTTTTTGAACATATACAAAAGCTCA
TTTAAACCAATTAAATAAAATTGTTTTTAATCTCTTTCTCTAGAGTCAACTTCCTGCTT
ACTCCAACTCTGTATCTTTGAAGGAAGTATAGGGTGGTCTATGCCTTTTTTCTCCCAG
AATCTACACTTGAAAAGACACATTTTTCCATGCAACTATAAAATGTTCTCCTCACTCA
ACATTGAAATTGTATAGCAGTGATTAAGAGAGTGAGCTGTAGAGCCAGGTTCCCTGG
GTTTAAATCCCACTTGTTAGTATCATGAAGATGGGCAAGTTACTTACCCTTCCTGTGT
TTCAGTTTCTTCATCTGCAAAATGGGGACAATAATAGAATGTCCACTATAAGATTATT
GTGAGGATTAAGGGAATTAATACAGGTAAAACGTGTACTGATGCAGGTCTGGTACAC
ATTAAGTGCCTAATAAATATTCAGTATTATGATATAAAGAACCCTATAAGTGTAGACT
CCTTGAGATTAATAGAGTTTAACGATAAGTTTTACTTTATAGCTGGTCAAGTTTATTT
CTTCTGAACTAAAAGAATCTATAGAGTCTCAATTTCTGGAGCTTCAGAGGGAAGGAG
AGAAGCAATGTAAGCAACATTCTACAGAAATATAAATAATACTACTAATAATTAGCA
TCTTAAAATTTCAATTCAATGAACATTTATTTAGCGCCTATGATATATGCAAGACAGT
TTGATTTTAGTCATCTGATGTATAGCCACATACTAAAAAATACTGATTTTAGTCATCT
GATGTATAGCCACATACTAAAAAATACTTCCTCCATCAGTTCCCTCCTCAGGAAGTTC
AGTTCCCAATCCCAGGCTAGTACCTTGGTTCCTTATGTAAATAAACATCCACCAATTA
CATGCTATCTGCAAAGCACTCTGCTAGGCCCTGCAAATGGAAAAAAAAATGATAAAA
CATAGTCCAGGCCCTCAATGAGCTTACAGTCAAATATAATAGAGGAGACAAGAACAG
AGAGGCTCATAATACAACTAGAATAAAATGACTGCCGAATAAAAGGAAAGATTTAT
GCAGGTGTTCAAATGGAAAGTGAGATAAGTTTGCAGGTTAGTCTTTGCAGTCTCATA
AAAATCTTTATGGAGAAAAGGACAATGGTCATAGGGCTTAAAGAGTAAGTTTATAAT
CCTGACCAGTGGAGATGAAAGACTAGCATTGAAAATTGCATGACAAGACAATTCCAT
TAAACTGAAACATCAAGTGTGTGTAGGAAAAGATGGGGGTTATGACTGGAAACGTCA
CTTGGACTGCAATTATGAAGGGCCTTGACAAACAGGTCAAGAGTTTAAGAAGCAGTA
TAGAAAGTCTTCGTCCTGGATCTAGCCCTCCCAGAGTGTCCATCAGGATTATAAAGTC
CTTAAAATATTAGTCAAAAGGAACGACATCATTAGAAATGATAGAGAAACAATAATG
TGATGTTTTATTACCTTTCTCTGGATTTATACTCTGATCCTAATATTCAAAACTATCTT
AATAACATGAACTTTTGGTCATAGTTTTAAACAAAAACAGTGTTAAATATATTTTTTA
AAACACAGTAAGTCTTGTAAGATCTTTTCTAACATGACATTTTGCAGGGCCCATATTT
TCCTTCTGAAATGGGAAAAATTCATAAAAGTAGACACCAAACTGGGTTACTTCTAGT
CAAGCGCATGGTACGCAAAGGACCAGACAAAAAGGGCCTGTGACATTTCTTCTTCCT
TTTGTGTTTTTTAGGAGAGGCATGCTGCGGAGGTGCGCAGGAACAAGGAACTCCAGG
TTGAACTGTCTGGCTGAAGCAAGGGAGGGTCTGGCACGCCCCACCAATAGTAAATCC
CCCTGCCTATATTATAATGGATCATGCGATATCAGGATGGGGAATGTATGACATGGTT
TAAAAAGAACTCATTATAAAAAAAAAAAAACAAAAAAAATCAAAAATTAAAAAAAA
TCAATGCGGTCTCTTTGCAGAATGTTTTGCTTGATGTTTAAAAAATACCTTGGATCTT
ATTTTGTAAATACTTACATTTTTGTTAAAAAATACAAGTATTGCATTATGCAAGTTAT
TTCATAATCTTACATGTCCTGTAACAGGCTTTTGATGTTGTGTCTTTCCACTCAAATGA
ATTTGCTAGGTCTGTTCTTTTTGAAGCTCCCCATGTCTAACTCCATTCCAAAAGAAAA
ATGAGGTCAGTAGACAGTCTATGGTGCTAGAAACCCACCATTGCCTAATGACCTAGA
AGGCTTTGTTGTCTCTGAGCTTGACTAAGACCATACCTAGATCACAGGTATTATGACT
CCACATGAACCTTCACATTTGTTCGCTCATAATCTACTTACTGCCTAAAAACTACAAA
ACCAGGCTAAGAAATACCACCAGTCATAGCATTTACTTCTGCTTCTCCTGGATTATGT
GCTACAAATGTGCTTTGGCTTTAGAAAGGGATGGATGAGAAGACAGACCTGAGACCA
ATCTGGGTAGAAGCAAAAAGTTGAACCTTTTAAAGTGCTGAACACAAATCCAAATTC
GAATGGTTCAAGCAGCCGTGAAATCGCTCTTCATAAAGTGGGCTTAATTCTCTAGTTT
AAGTTCTTTTGATGGAATGAATTAATTAATGTGTCAGGTGGCTTATTTGTGGATGCCA
TGATTGATGATGTTCATTTTAAGCTCTTACCTATAGTACAAGTACATGATGCTACTGA
ATATTTTTCCACTTGGAAACTGTGAGCTGGTTGTTGCATTAAAACACACATACAAACA
AAATCAAAAACACTGCGGACTTTCACTCAAGCTGGTCTTTCTTCCCCAGTGTAAGGCA
ATCCTGCCTACTAACAACACCAACAACAAAACACTCCATCTGTGAAGCTGACGCAGT
TAAGGGGGCTAGGCAGGGCATTTGTGCCAACTAAGAATCACCAGATACCCACCATAA
GTACCTATCGCAGTTTTGAAGTCGTTTCTCCCCAACTCCCAACTCCTGAAGGTTGCTG
CCTGCATATTTACTCTTCATTAGTGCTATTTTCCTGTATGTCATTGTGAGCAAGCTGTG
ATTAATAAAGAATTGGAGTTCTGTGAACTAATAAAGGTTTGGTCTGTT

### STMN2 Oligonucleotides Targeting Regions of the STMN2 Transcript

[0260] In various embodiments, STMN2 AON disclosed herein are complementary to specific regions of STMN2 transcripts (for example, a STMN2 pre-mRNA comprising a cryptic exon) comprising a sequence that shares at least 90% (e.g., 90%, 91%, 92%, 93%, 94%, 95%, 96%, 97%, 98%, 99%, or 100%) identity to SEQ ID NO: 1341. In some embodiments, a STMN2 AON comprises a sequence that is complementary to a specific region of the STMN2 transcript (for example, a STMN2 pre-mRNA comprising a cryptic exon) comprising a sequence that shares at least 90% (e.g., 90%, 91%, 92%, 93%, 94%, 95%, 96%, 97%, 98%, 99%, or 100%) identity to SEQ ID NO: 1339 or SEQ ID NO: 1341. In some embodiments, a STMN2 AON comprises a sequence that is between 85 and 98% complementary to a specific region of the STMN2 transcript. In some embodiments, a STMN2 AON comprises a sequence that is 90 to 95% complementary to a specific region of the STMN2 transcript.

[0261] In some embodiments, the STMN2 AON (e.g., STMN2 AON) has a segment that has, at most, 7 linked nucleosides. In some embodiments, the STMN2 AON has a segment that has, at most, 6, 5, 4, 3, or 2 linked nucleosides. The segments of the STMN2 AON may be separated from other segments of the STMN2 AON through a spacer. The segment of the STMN2 AON is complementary to a specific region of the STMN2 transcript (for example, a STMN2 transcript comprising a cryptic exon) comprising a sequence that shares at least 90% (e.g., 90%, 91%, 92%, 93%, 94%, 95%, 96%, 97%, 98%, 99%, or 100%) identity to SEQ ID NO: 1339 or SEQ ID NO: 1341.

[0262] In some embodiments, a STMN2 AON targets a specific portion of the STMN2 transcript, the specific portion of the STMN2 transcript comprising any one of positions 144-168, 173-197, 185-209, or 237-261 of SEQ ID NO: 1339. In some embodiments, a STMN2 AON targets a specific portion of the STMN2 transcript, the specific portion of the STMN2 transcript comprising any one of positions 121-144, 146-170, 150-170, 150-172, 150-170, 150-172, 150-174, 169-193, 170-194, 171-195, 172-196, 197-221, 249-273, 252-276, or 276-300. In some embodiments, a STMN2 AON targets a specific portion of the STMN2 transcript, the specific portion of the STMN2 transcript comprising any one of positions 144-164, 144-166, 145-167, 146-166, 146-168, 147-165, or 148-168 of SEQ ID NO: 1339. In some embodiments, a STMN2 AON targets a specific portion of the STMN2 transcript, the specific portion of the STMN2 transcript comprising any one of positions 173-191, 173-193, 173-195, 173-197, 175-195, 175-197, 177-197, or 179-197 of SEQ ID NO: 1339. In some embodiments, a STMN2 AON targets a specific portion of the STMN2 transcript, the specific portion of the STMN2 transcript comprising any one of positions 185-205, 187-209, 189-209, or 191-209 of SEQ ID NO: 1339. In some embodiments, a STMN2 AON targets a specific portion of the STMN2 transcript, the specific portion of the STMN2 transcript comprising any one of positions 237-255, 237-259, 239-259, 239-261, 241-261, or 243-261 of SEQ ID NO: 1339.

[0263] In some embodiments, a STMN2 AON targets a specific portion of the STMN2 transcript, the specific portion of the STMN2 transcript consisting of any one of positions 144-168, 173-197, 185-209, or 237-261 of SEQ ID NO: 1339. In some embodiments, a STMN2 AON targets a specific portion of the STMN2 transcript, the specific portion of the STMN2 transcript consisting of any one of positions 144-164, 144-166, 145-167, 146-166, 146-168, 147-165, or 148-168 of SEQ ID NO: 1339. In some embodiments, a STMN2 AON targets a specific portion of the STMN2 transcript, the specific portion of the STMN2 transcript consisting of any one of positions 173-191, 173-193, 173-195, 173-197, 175-195, 175-197, 177-197, or 179-197 of SEQ ID NO: 1339. In some embodiments, a STMN2 AON targets a specific portion of the STMN2 transcript, the specific portion of the STMN2 transcript consisting of any one of positions 185-205, 187-209, 189-209, or 191-209 of SEQ ID NO: 1339. In some embodiments, a STMN2 AON targets a specific portion of the STMN2 transcript, the specific portion of the STMN2 transcript consisting of any one of positions 237-255, 237-259, 239-259, 239-261, 241-261, or 243-261 of SEQ ID NO: 1339.

### STMN2 Oligonucleotide Variants

[0264] In various embodiments, STMN2 AONs include different variants, hereafter referred to as STMN2 AON variants. A STMN2 AON variant may be an oligonucleotide sequence of 5 to 100 nucleobases in length, for example, 10 to 40 nucleobases in length, for example, 14 to 40 nucleobases in length, 10 to 30 nucleobases in length, for example, 14 to 30 nucleobases in length, for example, 16 to 28 nucleobases in length, for example, 19 to 23 nucleobases in length, for example, 21 to 23 nucleobases in length, for example, or 18, 19, 20, 21, 22, 23, 24, 25, 26, 27, 28, 29, or 30 nucleobases in length. A STMN2 AON variant may be an oligonucleotide sequence complementary to a portion of a STMN2 pre-mRNA sequence or a STMN2 gene sequence.

[0265] In various embodiments, a STMN2 AON variant represents a modified version of a corresponding STMN2 parent oligonucleotide that includes a nucleobase sequence selected from any one of SEQ ID NOs: 1-446 or SEQ ID NOs: 893-1338. In some embodiments, a STMN2 AON variant includes a nucleobase sequence that represents a shortened version of a nucleobase sequence of a STMN2 AON selected from any one of SEQ ID NOs: 1-446 or SEQ ID NOs: 893-1338. As one example, if a STMN2 parent oligonucleotide includes a 25mer (e.g., 25 nucleotide bases in length) a variant (e.g., a STMN2 variant) may include a shorter version (e.g., 15mer, 17mer, 19mer, 21mer, or 23mer) of the 25mer STMN2 parent oligonucleotide. In one embodiment, a nucleobase sequence of a STMN2 AON variant differs from a corresponding nucleobase sequence of a STMN2 parent oligonucleotide in that 1, 2, 3, 4, 5, or 6 nucleotide bases are removed from one or both of the 3′ and 5′ ends of the nucleobase sequence of the STMN2 parent oligonucleotide. In one embodiment, the corresponding STMN2 AON variant may include a 23mer where two nucleotide bases were removed from one of the 3′ or 5′ end of a 25mer included in the STMN2 parent oligonucleotide. In one embodiment, the corresponding STMN2 AON variant may include a 23mer where one nucleotide base is removed from each of the 3′ and 5′ ends of the 25mer included in the STMN2 parent oligonucleotide. In one embodiment, the corresponding STMN2 AON variant may include a 21mer where two nucleotide bases are removed from each of the 3′ and 5′ ends of the 25mer included in the STMN2 parent oligonucleotide. In one embodiment, the corresponding STMN2 AON variant may include a 21mer where four nucleotide bases are removed from either the 3′ or 5′ end of the 25mer included in the STMN2 parent oligonucleotide. In one embodiment, the corresponding STMN2 AON variant may include a 19mer where three nucleotide bases are removed from each of the 3′ and 5′ ends of the 25mer included in the STMN2 parent oligonucleotide. In one embodiment, the corresponding STMN2 AON variant may include a 19mer where six nucleotide bases are removed from either the 3′ or 5′ end of the 25mer included in the STMN2 parent oligonucleotide.

[0266] Example sequences of STMN2 AON variants are shown below in Tables 5A and 5B.

TABLE 5A
STMN2 Oligonucleotide Variant Sequences

| SEQ | |
|---|---|
| ID | |
| NO: | |
| | AON Sequence* (5′ → 3′) |
| 1342 | ATCCAATTAAGAGAGAGTGATGG |
| 1343 | AATCCAATTAAGAGAGAGTGATG |
| 1344 | TCCAATTAAGAGAGAGTGATGGG |
| 1345 | GAGTCCTGCAATATGAATATAAT |
| 1346 | GTCCTGCAATATGAATATAATTT |
| 1347 | GTCTTCTGCCGAGTCCTGCAATA |
| 1348 | GCACACATGCTCACACAGAGAGC |
| 1349 | ACACATGCTCACACAGAGAGCCA |
| 1350 | TCCAATTAAGAGAGAGTGATG |
| 1351 | AATCCAATTAAGAGAGAGTGA |
| 1352 | CAATTAAGAGAGAGTGATGGG |
| 1353 | GTCCTGCAATATGAATATAAT |
| 1354 | GAGTCCTGCAATATGAATATA |
| 1355 | CCTGCAATATGAATATAATTT |
| 1356 | AGGTCTTCTGCCGAGTCCTGC |
| 1357 | CTTCTGCCGAGTCCTGCAATA |
| 1358 | ACACATGCTCACACAGAGAGC |
| 1359 | GCACACATGCTCACACAGAGA |
| 1360 | ACATGCTCACACAGAGAGCCA |
| 1361 | CCAATTAAGAGAGAGTGAT |
| 1362 | GAGTCCTGCAATATGAATA |
| 1363 | TGCAATATGAATATAATTT |
| 1364 | TCTGCCGAGTCCTGCAATA |
| 1365 | GCACACATGCTCACACAGA |
| 1366 | ATGCTCACACAGAGAGCCA |
| | Target Sequence (5′ → 3′) |
| 1367 | CCATCACTCTCTCTTAATTGGAT |
| 1368 | CATCACTCTCTCTTAATTGGATT |
| 1369 | CCCATCACTCTCTCTTAATTGGA |
| 1370 | ATTATATTCATATTGCAGGACTC |
| 1371 | AAATTATATTCATATTGCAGGAC |
| 1372 | TATTGCAGGACTCGGCAGAAGAC |
| 1373 | GCTCTCTGTGTGAGCATGTGTGC |
| 1374 | TGGCTCTCTGTGTGAGCATGTGT |
| 1375 | CATCACTCTCTCTTAATTGGA |
| 1376 | TCACTCTCTCTTAATTGGATT |
| 1377 | CCCATCACTCTCTCTTAATTG |
| 1378 | ATTATATTCATATTGCAGGAC |
| 1379 | TATATTCATATTGCAGGACTC |
| 1380 | AAATTATATTCATATTGCAGG |
| 1381 | GCAGGACTCGGCAGAAGACCT |
| 1382 | TATTGCAGGACTCGGCAGAAG |
| 1383 | GCTCTCTGTGTGAGCATGTGT |
| 1384 | TCTCTGTGTGAGCATGTGTGC |
| 1385 | TGGCTCTCTGTGTGAGCATGT |
| 1386 | ATCACTCTCTCTTAATTGG |
| 1387 | TATTCATATTGCAGGACTC |
| 1388 | AAATTATATTCATATTGCA |
| 1389 | TATTGCAGGACTCGGCAGA |
| 1390 | TCTGTGTGAGCATGTGTGC |
| 1391 | TGGCTCTCTGTGTGAGCAT |

* At least one nucleoside linkage of the nucleobase sequence is selected from a phosphorothioate linkage, an alkyl phosphate linkage, a phosphorodithioate linkage, a phosphotriester linkage,
an alkylphosphonate linkage, a 3-methoxypropyl phosphonate linkage, a methylphosphonate linkage, an aminoalkylphosphotriester linkage, an alkylene phosphonate linkage, a phosphinate linkage,
a phosphoramidate linkage, a phosphoramidothioate linkage, a thiophosphorodiamidate linkage, a phosphorodiamidate (e.g., comprising a phosphorodiamidate morpholino (PMO), 3’ amino ribose, or
5’ amino ribose) linkage, an aminoalkylphosphoramidate linkage, a thiophosphoramidate linkage, a thionoalkylphosphonate linkage, a thionoalkylphosphotriester linkage, a thiophosphate
linkage, a selenophosphate linkage, and a boranophosphate linkage.

TABLE 5B
Additional STMN2 Oligonucleotide Variant
Sequences

| SEQ ID NO: | AON Sequence* (5′ → 3′) |
|---|---|
| 1421 | CCTGCAATATGAATATAATTTTA |
| 1422 | TGCAATATGAATATAATTTTAAA |
| 1423 | CTGCAATATGAATATAATTTTAA |
| 1424 | TGCAATATGAATATAATTTTA |
| 1425 | TCCTGCAATATGAATATAATTTT |
| 1426 | CTGCAATATGAATATAATTTT |
| 1427 | AGTCCTGCAATATGAATATAATT |
| 1428 | TCCTGCAATATGAATATAATT |
| 1429 | TTTCTCTCGAAGGTCTTCTGCCG |
| 1430 | CCTTTCTCTCGAAGGTCTTCTGC |
| 1431 | CTTTCTCTCGAAGGTCTTCTGCC |
| 1432 | CTCTCGCACACACGCACACATGC |
| 1433 | CTCTCTCGCACACACGCACACAT |
| 1434 | TCTCTCGCACACACGCACACATG |
| 1435 | CTCTCGCACACACGCACACAT |

* At least one nucleoside linkage of the nucleobase sequence is selected from a phosphorothioate linkage, an alkyl phosphate linkage, a phosphorodithioate linkage, a phosphotriester linkage,
an alkylphosphonate linkage, a 3-methoxypropyl phosphonate linkage, a methylphosphonate linkage, an aminoalkylphosphotriester linkage, an alkylene phosphonate linkage, a phosphinate linkage,
a phosphoramidate linkage, a phosphoramidothioate linkage, a thiophosphorodiamidate linkage, a phosphorodiamidate (e.g., comprising a phosphorodiamidate morpholino (PMO), 3’ amino ribose,
or 5’ amino ribose) linkage, an aminoalkylphosphoramidate linkage, a thiophosphoramidate linkage, a thionoalkylphosphonate linkage, a thionoalkylphosphotriester linkage, a thiophosphate
linkage, a selenophosphate linkage, and a boranophosphate linkage.

[0267] Table 6 below identifies additional variants of STMN2 AON sequences:

TABLE 6
Additional STMN2 Oligonucleotide
Variant Sequences

| SEQ | |
|---|---|
| ID | |
| NO: | AON Sequence* (5′ → 3′) |
| 1392 | AUCCAAUUAAGAGAGAGUGAUGG |
| 1393 | AAUCCAAUUAAGAGAGAGUGAUG |
| 1394 | UCCAAUUAAGAGAGAGUGAUGGG |
| 1395 | GAGUCCUGCAAUAUGAAUAUAAU |
| 1396 | GUCCUGCAAUAUGAAUAUAAUUU |
| 1397 | GUCUUCUGCCGAGUCCUGCAAUA |
| 1398 | GCACACAUGCUCACACAGAGAGC |
| 1399 | ACACAUGCUCACACAGAGAGCCA |
| 1400 | UCCAAUUAAGAGAGAGUGAUG |
| 1401 | AAUCCAAUUAAGAGAGAGUGA |
| 1402 | CAAUUAAGAGAGAGUGAUGGG |
| 1403 | GUCCUGCAAUAUGAAUAUAAU |
| 1404 | GAGUCCUGCAAUAUGAAUAUA |
| 1405 | CCUGCAAUAUGAAUAUAAUUU |
| 1406 | AGGUCUUCUGCCGAGUCCUGC |
| 1407 | CUUCUGCCGAGUCCUGCAAUA |
| 1408 | ACACAUGCUCACACAGAGAGC |
| 1409 | GCACACAUGCUCACACAGAGA |
| 1410 | ACAUGCUCACACAGAGAGCCA |
| 1411 | CCAAUUAAGAGAGAGUGAU |
| 1412 | GAGUCCUGCAAUAUGAAUA |
| 1413 | UGCAAUAUGAAUAUAAUUU |
| 1414 | UCUGCCGAGUCCUGCAAUA |
| 1415 | GCACACAUGCUCACACAGA |
| 1416 | AUGCUCACACAGAGAGCCA |
| 1436 | CCUGCAAUAUGAAUAUAAUUUUA |
| 1437 | UGCAAUAUGAAUAUAAUUUUAAA |
| 1438 | CUGCAAUAUGAAUAUAAUUUUAA |
| 1439 | UGCAAUAUGAAUAUAAUUUUA |
| 1440 | UCCUGCAAUAUGAAUAUAAUUUU |
| 1441 | CUGCAAUAUGAAUAUAAUUUU |
| 1442 | AGUCCUGCAAUAUGAAUAUAAUU |
| 1443 | UCCUGCAAUAUGAAUAUAAUU |
| 1444 | UUUCUCUCGAAGGUCUUCUGCCG |
| 1445 | CCUUUCUCUCGAAGGUCUUCUGC |
| 1446 | CUUUCUCUCGAAGGUCUUCUGCC |
| 1447 | CUCUCGCACACACGCACACAUGC |
| 1448 | CUCUCUCGCACACACGCACACAU |
| 1449 | UCUCUCGCACACACGCACACAUG |
| 1450 | CUCUCGCACACACGCACACAU |

* At least one nucleoside linkage of the nucleobase sequence is selected from a phosphorothioate linkage, an alkyl phosphate linkage, a phosphorodithioate linkage, a phosphotriester linkage,
an alkylphosphonate linkage, a 3-methoxypropyl phosphonate linkage, a methylphosphonate linkage, an aminoalkylphosphotriester linkage, an alkylene phosphonate linkage, a phosphinate linkage,
a phosphoramidate linkage, a phosphoramidothioate linkage, a thiophosphorodiamidate linkage, a phosphorodiamidate (e.g., comprising a phosphorodiamidate morpholino (PMO), 3’ amino ribose,
or 5’ amino ribose) linkage, an aminoalkylphosphoramidate linkage, a thiophosphoramidate linkage, a thionoalkylphosphonate linkage, a thionoalkylphosphotriester linkage, a thiophosphate
linkage, a selenophosphate linkage, and a boranophosphate linkage.

Antisense Oligonucleotides with One or More Spacers

[0268] In various embodiments, antisense oligonucleotides comprise one or more spacers. In particular embodiments, an antisense oligonucleotide includes one spacer. In particular embodiments, an antisense oligonucleotide includes two spacers. In particular embodiments, an antisense oligonucleotide includes three spacers. Generally, a spacer refers to a nucleoside-replacement group lacking a nucleotide base and wherein the nucleoside sugar moiety is replaced by a non-sugar substitute group. The non-sugar substitute group is not capable of linking to a nucleobase, but is capable of linking with the 3′ and 5′ positions of nucleosides adjacent to the spacer through an internucleoside linking group.

[0269] In certain embodiments, an oligonucleotide with one or more spacers, such as disclosed herein, may be an oligonucleotide with 5 to 100 oligonucleotide units in length, for example, 10 to 60 oligonucleotide units in length, for example, 12 to 50 oligonucleotide units in length, 14 to 40 oligonucleotide units in length, 10 to 30 oligonucleotide units in length, for example, 14 to 30 oligonucleotide units in length, for example, 14 to 25 or 15 to 22 oligonucleotide units in length, or 18, 19, 20, 21, 22, 23, 24, or 25 oligonucleotide units in length. As used herein, an “oligonucleotide unit” refers to either a nucleoside (e.g., a nucleoside which includes a sugar and/or a nucleobase) or a nucleoside-replacement group (e.g., a spacer) of the oligonucleotide.

[0270] In particular embodiments, oligonucleotides with one or more spacers are 25 oligonucleotide units in length. In particular embodiments, the oligonucleotides with one or more spacers are 23 oligonucleotide units in length. In particular embodiments, the oligonucleotides with one or more spacers are 21 oligonucleotide units in length. In particular embodiments, the oligonucleotides with one or more spacers are 19 oligonucleotide units in length. In various embodiments, the oligonucleotides with one or more spacers are at least 18, at least 19, at least 20, at least 21, at least 22, at least 23, at least 24, or at least 25 oligonucleotide units in length. In various embodiments, the oligonucleotides with one or more spacers are at least 18 oligonucleotide units in length. In various embodiments, the oligonucleotides with one or more spacers are at least 19 oligonucleotide units in length. In various embodiments, the oligonucleotides with one or more spacers are at least 20 oligonucleotide units in length. In various embodiments, the oligonucleotides with one or more spacers are at least 21 oligonucleotide units in length. In various embodiments, the oligonucleotides with one or more spacers are at least 22 oligonucleotide units in length. In various embodiments, the oligonucleotides with one or more spacers are at least 23 oligonucleotide units in length. In various embodiments, the oligonucleotides with one or more spacers are at least 24 oligonucleotide units in length. In various embodiments, the oligonucleotides with one or more spacers are at least 25 oligonucleotide units in length.

[0271] In various embodiments, a STMN2 AON comprises a sequence that shares at least 80% identity with an equal length portion of any one of SEQ ID NOs: 1451-1664. In various embodiments, a STMN2 AON comprises a sequence that shares at least 85% identity with an equal length portion of any one of SEQ ID NOs: 1451-1664. In various embodiments, a STMN2 AON comprises a sequence that shares at least 90% identity with an equal length portion of any one of SEQ ID NOs: 1451-1664. In various embodiments, a STMN2 AON comprises a sequence that shares at least 95% identity with an equal length portion of any one of SEQ ID NOs: 1451-1664. In various embodiments, a STMN2 AON comprises a sequence that shares 100% identity with an equal length portion of any one of SEQ ID NOs: 1451-1664.

[0272] In some embodiments, the spacer is of Formula (X):

[chemical structure]

wherein ring A is as defined herein.

[0273] In some embodiments, the spacer is of Formula (Xa):

[chemical structure]

wherein ring A is as defined herein and the —CH₂—O— group is on a ring A atom adjacent to the —O— group.

[0274] As generally defined herein, ring A of formulae (X) and (Xa), is an optionally substituted 4-8 member monocyclic cycloalkyl group (e.g. ring A is cyclobutyl, cyclopentyl, cyclohexyl, cycloheptyl, cyclooctyl) or a 4-8 member monocyclic heterocyclyl group, wherein the heterocyclyl group contains 1 or 2 heteroatoms selected from O, S and N (e.g. ring A is oxetanyl, tetrahydrofuranyl, tetrahydropyranyl, 1,4-dioxanyl, pyrrolidinyl, piperidinyl, piperazinyl, morpholinyl, azepanyl). In some embodiments, ring A is tetrahydrofuranyl. In some embodiments, ring A is tetrahydropyranyl. In some embodiments, ring A is pyrrolidinyl. In some embodiments, ring A is cyclopentyl. In some embodiments, the monocyclic cycloalkyl or monocyclic heterocyclyl is not further substituted. In some embodiments, the cycloalkyl or heterocyclyl is further substituted with 0, 1, 2 or 3 substituents selected from halo (e.g., —F, —Cl), -Ome, -Oet —O(CH₂)Ome, —O(CH₂)₂Ome and CN. In some embodiments, the spacer is represented by Formula (I), wherein:

[chemical structure]

[0275] X is selected from —CH₂— and —O—; and

[0276] n is 0, 1, 2 or 3.

[0277] In some embodiments, the spacer is represented by Formula (I′), wherein:

[chemical structure]

[0278] X is selected from —CH₂— and —O—; and

[0279] n is 0, 1, 2 or 3.

[0280] In some embodiments, the spacer is represented by Formula (Ia), wherein:

[chemical structure]

[0281] and n is 0, 1, 2 or 3.

[0282] In some embodiments, the spacer is represented by Formula (Ia′), wherein:

[chemical structure]

[0283] and n is 0, 1, 2 or 3.

[0284] As generally defined herein, X is selected from —CH₂— and —O—. In some embodiments, X is —CH₂—. In other embodiments, X is —O—.

[0285] As generally defined herein, n is 0, 1, 2 or 3. In some embodiments, n is 0. In some embodiments, n is 1 or 2. In some embodiments, n is 1. In other embodiments, n is 2. In certain embodiments, n is 3.

[0286] In some embodiments, the spacer is represented by Formula (II), wherein:

[chemical structure]

[0287] X is selected from —CH₂— and

[0288] In some embodiments, the spacer is represented by Formula (II′), wherein:

[chemical structure]

[0289] X is selected from —CH₂— and —O.

[0290] In some embodiments, the spacer is represented by Formula (Iia), wherein:

[chemical structure]

[0291] In some embodiments, the spacer is represented by Formula (Iia′), wherein:

[chemical structure]

[0292] In some embodiments, the spacer is represented by Formula (III), wherein:

[chemical structure]

[0293] X is selected from —CH₂— and —O—.

[0294] In some embodiments, the spacer is represented by Formula (III′), wherein:

[chemical structure]

[0295] X is selected from —CH₂— and —O.

[0296] In some embodiments, the spacer is represented by Formula (IIIa), wherein:

[chemical structure]

[0297] In some embodiments, the spacer is represented by Formula (IIIa′), wherein:

[chemical structure]

[0298] In some embodiments, the open positions of Formulae (I), (I′), (Ia), (Ia′), (II), (II′), (Iia), (Iia′), (III), (III′), (IIIa) and (IIIa′) (i.e., the positions not specifically depicted as bearing exclusively hydrogen atoms, including the —CH₂— group of X) are further substituted with 0-3 substituents selected from halo (e.g., —F, —Cl), -Ome, -Oet —O(CH₂)Ome, —O(CH₂)₂Ome and CN. In some embodiments, Formulae (I), (I′), (Ia), (Ia′), (II), (II′), (Iia), (Iia′), (III), (III′), (IIIa) and (IIIa′) are not further substituted.

[0299] As described further below, a STMN2 oligonucleotide with one or more spacers is described in reference to a corresponding STMN2 parent oligonucleotide. In various embodiments, a STMN2 oligonucleotide with a spacer differs from a STMN2 parent oligonucleotide in that the spacer replaces a nucleoside in the STMN2 parent oligonucleotide. As used hereafter, the “position” of the STMN2 oligonucleotide refers to a particular location as counted from the 5′ end of the STMN2 oligonucleotide. In various embodiments, the spacer replaces a nucleoside at any one of positions 1, 2, 3, 4, 5, 6, 7, 8, 9, 10, 11, 12, 13, 14, 15, 16, 17, 18, 19, 20, 21, 22, 23, 24, or 25 of the STMN2 parent oligonucleotide. In particular embodiments, a spacer replaces a nucleoside at one of positions 7, 8, 11, 14, 16, 19, or 22 of the STMN2 parent oligonucleotide.

[0300] In various embodiments, a STMN2 oligonucleotide includes one spacer that replaces a nucleoside in the STMN2 parent oligonucleotide (e.g., one spacer replaces one nucleoside of the STMN2 parent oligonucleotide). In particular embodiments, the spacer replaces a nucleoside between positions 9 and 15 of the STMN2 parent oligonucleotide. In particular embodiments, the spacer replaces a nucleoside between positions 9 and 12 of the STMN2 parent oligonucleotide. In particular embodiments, the spacer replaces a nucleoside at position 10 of the STMN2 parent oligonucleotide. In particular embodiments, the spacer replaces a nucleoside at position 11 of the STMN2 parent oligonucleotide. In particular embodiments, the spacer replaces a nucleoside at position 12 of the STMN2 parent oligonucleotide. In particular embodiments, the spacer replaces a nucleoside between positions 12 and 16 of the STMN2 parent oligonucleotide. In particular embodiments, the spacer replaces a nucleoside at position 15 of the STMN2 parent oligonucleotide.

[0301] In various embodiments, a STMN2 oligonucleotide including one spacer has 2 segments, where at least one of the 2 segments has at most 11 linked nucleosides. For example, the STMN2 oligonucleotide may be 23 oligonucleotide units in length, and the spacer can be located at position 12. Therefore, the STMN2 oligonucleotide has 2 segments divided by the spacer, where both of the 2 segments are 11 nucleobases in length. In various embodiments, a STMN2 oligonucleotide including one spacer has 2 segments, where at least one of the 2 segments has at most 10 linked nucleosides. For example, the STMN2 oligonucleotide may be 21 oligonucleotide units in length, and the spacer can be located at position 11. Therefore, the STMN2 oligonucleotide has 2 segments divided by the spacer, where both of the 2 segments are 10 nucleobases in length. As another example, the STMN2 oligonucleotide may be 25 oligonucleotide units in length, and the spacer can be located at position 15. Therefore, the STMN2 oligonucleotide has 2 segments divided by the spacer, where one of the 2 segments is 14 nucleobases in length and the second of the 2 segments is 10 nucleobases in length.

[0302] In various embodiments, a STMN2 oligonucleotide includes two spacers that each replace a nucleoside in the STMN2 parent oligonucleotide (e.g., two spacers replace two separate nucleosides of the STMN2 parent oligonucleotide). In various embodiments, a first spacer and a second spacer are separated by at least 5 nucleobases, at least 6 nucleobases, at least 7 nucleobases, at least 8 nucleobases, at least 9 nucleobases, or at least 10 nucleobases in the oligonucleotide. In particular embodiments, a first spacer and a second spacer are separated by at least 5 nucleobases, at least 6 nucleobases, or at least 7 nucleobases. In particular embodiments, the first spacer and the second spacer are not adjacent to one another in the oligonucleotide.

[0303] In particular embodiments, the first spacer replaces a nucleoside between positions 7 and 11 of the STMN2 parent oligonucleotide. In various embodiments, the first spacer replaces a nucleoside between positions 8 and 11, positions 9 and 11, positions 10 and 11, positions 7 and 10, positions 7 and 9, positions 7 and 8, positions 8 and 10, positions 8 and 9, or positions 9 and 10 of the STMN2 parent oligonucleotide. In particular embodiments, the second spacer replaces a nucleoside between positions 14 and 22 of the STMN2 parent oligonucleotide. In various embodiments, the second spacer replaces a nucleoside between positions 15 and 22, positions 16 and 22, positions 17 and 22, position 18 and 22, position 19 and 22, positions 20 and 22, positions 21 and 22, positions 15 and 21, position 16 and 21, positions 17 and 21, positions 18 and 21, positions 19 and 21, positions 20 and 21, positions 15 and 20, positions 16 and 20, positions 17 and 20, positions 18 and 20, positions 19 and 20, positions 15 and 19, positions 16 and 19, positions 17 and 19, positions 18 and 19, positions 15 and 18, position 16 and 18, position 17 and 18, positions 15 and 17, positions 16 and 17, or positions 15 and 16 of the STMN2 parent oligonucleotide.

[0304] In preferred embodiments, the first spacer replaces a nucleoside at position 7 of the STMN2 parent oligonucleotide and the second spacer replaces a nucleoside at position 14 of the STMN2 parent oligonucleotide. In preferred embodiments, the first spacer replaces a nucleoside at position 8 of the STMN2 parent oligonucleotide and the second spacer replaces a nucleoside at position 16 of the STMN2 parent oligonucleotide. In preferred embodiments, the first spacer replaces a nucleoside at position 11 of the STMN2 parent oligonucleotide and the second spacer replaces a nucleoside at position 22 of the STMN2 parent oligonucleotide. In preferred embodiments, the first spacer replaces a nucleoside at position 9 of the STMN2 parent oligonucleotide and the second spacer replaces a nucleoside at position 19 of the STMN2 parent oligonucleotide.

[0305] In various embodiments, a STMN2 oligonucleotide includes three spacers that each replace a nucleoside in the STMN2 parent oligonucleotide (e.g., three spacers replace three separate nucleosides of the STMN2 parent oligonucleotide). In particular embodiments, the first spacer replaces a nucleoside between positions 7 and 11 of the STMN2 parent oligonucleotide. In particular embodiments, the second spacer replaces a nucleoside between positions 14 and 22 of the STMN2 parent oligonucleotide. In particular embodiments, the third spacer replaces a nucleoside between positions 21 and 24 of the STMN2 parent oligonucleotide. In some embodiments, the first spacer replaces a nucleoside between positions 2 and 5 of the STMN2 parent oligonucleotide. In particular embodiments, the second spacer replaces a nucleoside between positions 8 and 12 of the STMN2 parent oligonucleotide. In particular embodiments, the third spacer replaces a nucleoside between positions 18 and 22 of the STMN2 parent oligonucleotide.

[0306] In various embodiments, the three spacers in a STMN2 oligonucleotide are positioned such that each of the four segments of the STMN2 oligonucleotide are at most 7 linked nucleosides in length. For example, a STMN2 oligonucleotide may have a first segment with 7 linked nucleosides connected to a first spacer, then a second segment with 7 linked nucleosides connected on one end to the first spacer and connected on another end to a second spacer, then a third segment with 6 linked nucleosides connected on one end to the second spacer and connected on another end to a third spacer, then a fourth segment with 6 linked nucleosides connected to the third spacer.

[0307] In various embodiments, the one or more spacers are positioned in the oligonucleotide to replace one or more adenosine or thymine nucleosides (as opposed to guanine or cytosine nucleosides). For example, the one or more spacers can replace one, two, three, four, five, six, seven, eight, or nine adenosine or thymine nucleosides in the oligonucleotide. In various embodiments, the one or more spacers are positioned in the oligonucleotide to replace one or more guanine or cytosine nucleosides (as opposed to adenosine or thymine nucleosides).). For example, the one or more spacers can replace one, two, three, four, five, six, seven, eight, or nine guanine or cytosine nucleosides in the oligonucleotide. In various embodiments, the spacers are positioned in the oligonucleotide to replace an equal number of adenosine/thymine nucleosides and guanine/cytosine nucleosides. For example, a first spacer in the oligonucleotide may replace an adenosine/thymine nucleoside and a second spacer in the oligonucleotide may replace a guanine/cytosine nucleoside.

[0308] In various embodiments, the one or more spacers are positioned in the oligonucleotide to control the sequence content in the oligonucleotide. For example, the one or more spacers are positioned such that at least one of the spacers is located adjacent to a guanine group. In various embodiments, an oligonucleotide with spacers can include one spacer adjacent to a guanine group, two spacers adjacent to guanine groups, three spacers adjacent to guanine groups, four spacers adjacent to guanine groups, or five spacers adjacent to guanine groups. In one embodiment, if counting from the 5′ end of the oligonucleotide, a spacer immediately precedes a guanine group in the sequence. Thus, in various embodiments, an oligonucleotide with spacers can include one spacer that immediately precedes a guanine group, two spacers that each immediately precede a guanine group, three spacers that each immediately precede a guanine group, four spacers that each immediately precede a guanine group, or five spacers that each immediately precede a guanine group. In one embodiment, if counting from the 5′ end of the oligonucleotide, a guanine group is immediately succeeded by a spacer. Thus, in various embodiments, an oligonucleotide with spacers can include one spacer that immediately succeeds a guanine group, two spacers that each immediately succeed a guanine group, three spacers that each immediately succeed a guanine group, four spacers that each immediately succeed a guanine group, or five spacers that each immediately succeed a guanine group. In various embodiments, the spacers in the oligonucleotide can be positioned to maximize the number of spacers adjacent to guanine groups.

[0309] In various embodiments, the one or more spacers are positioned in the oligonucleotide to replace one or more adenosine or thymine nucleosides such that the one or more spacers are located adjacent guanine groups. For example, two spacers can replace adenosine or thymine nucleosides in the oligonucleotide, each of the two spacers being located adjacent to a guanine group.

[0310] In various embodiments, the STMN2 oligonucleotide with one or more spacers has a particular GC content. As used herein, GC content (or guanine-cytosine content) is the percentage of nitrogenous bases in the oligonucleotide that are either guanine (G) or cytosine ®. In various embodiments, the STMN2 oligonucleotide with one or more spacers has at least 10% GC content, at least 20% GC content, at least 25% GC content, at least 30% GC content, at least 35% GC content, at least 40% GC content, at least 45% GC content, at least 50% GC content, at least 55% GC content, at least 60% GC content, at least 65% GC content, at least 75% GC content, at least 80% GC content, at least 85% GC content, at least 90% GC content, or at least 95% GC content. In particular embodiments, the STMN2 oligonucleotide with one or more spacers has at least 30% GC content. In particular embodiments, the STMN2 oligonucleotide with one or more spacers has at least 40% GC content. In various embodiments, the one or more spacers are positioned in the STMN2 oligonucleotide to maximize GC content. For example, instead of selecting a guanine or cytosine for replacement by a spacer in the STMN2 oligonucleotide, a thymine or adenine can be selected for replacement by a spacer.

[0311] In various embodiments, a STMN2 oligonucleotide with spacers is designed such that 1) each segment of the STMN2 oligonucleotide has at most 7 linked nucleosides and 2) at least two, three, or four spacers are positioned adjacent to a guanine group. In some embodiments, a STMN2 oligonucleotide with spacers is designed such that 1) each segment of the STMN2 oligonucleotide has at most 7 linked nucleosides and 2) each of two spacers precede a guanine group.

[0312] In various embodiments, the inclusion of one or more spacers in the STMN2 oligonucleotide does not decrease the effectiveness of the STMN2 oligonucleotide with the spacers in restoring full length STMN2 protein or full length STMN2 mRNA in comparison to the effect of a corresponding STMN2 parent oligonucleotide. In various embodiments, the inclusion of one or more spacers in the STMN2 oligonucleotide increases the effectiveness of the STMN2 oligonucleotide with the spacers in restoring full length STMN2 protein or full length STMN2 mRNA in comparison to the effect of a corresponding STMN2 parent oligonucleotide. In various embodiments, the inclusion of one or more spacers in the STMN2 oligonucleotide does not decrease the effectiveness of the STMN2 oligonucleotide with the spacers in reducing quantity of STMN2 transcripts with a cryptic exon in comparison to the effect of a corresponding STMN2 parent oligonucleotide. In various embodiments, the inclusion of one or more spacers in the STMN2 oligonucleotide increases the effectiveness of the STMN2 oligonucleotide with the spacers in reducing quantity of STMN2 transcripts with a cryptic exon in comparison to the effect of a corresponding STMN2 parent oligonucleotide.

[0313] Tables 7A, 7B, 8, and 9 document example STMN2 oligonucleotides with one or more spacers and their relation to corresponding STMN2 parent oligonucleotides. Each STMN2 oligonucleotide is assigned a sequence name. As used hereafter, the nomenclature of the sequence name is expressed as “X_spA” (for a STMN2 AON with one spacer), “X_spA_spB” (for a STMN2 AON with two spacers), or “X_spA_spB_spC” (for a STMN2 AON with three spacers). Here, “X” refers to the length of the STMN2 AON, “A” refers to the position in the STMN2 AON where the first spacer is located, “B” refers to the position in the STMN2 AON where the second spacer is located, and if present, “C” refers to the position in the STMN2 AON where the third spacer is located.

[0314] In various embodiments, STMN2 oligonucleotides include one spacer. In various embodiments, the STMN2 oligonucleotides are oligonucleotide variants, such as any one of a 23mer, 21mer, or 19mer. In various embodiments, the inclusion of a spacer divides up the STMN2 oligonucleotide into two separate segments, where at least one of the segments is at most 11 linked nucleosides in length. In various embodiments, the inclusion of a spacer divides up the STMN2 oligonucleotide into two separate segments, where at least one of the segments is at most 10 linked nucleosides in length.

[0315] In various embodiments, the spacer is located between positions 10 and 15 of the oligonucleotide. In various embodiments, the spacer is located between positions 10 and 12 of the oligonucleotide. In particular embodiments, the spacer is located at position 10 of the oligonucleotide. In particular embodiments, the spacer is located at position 11 of the oligonucleotide. In particular embodiments, the spacer is located at position 12 of the oligonucleotide. In particular embodiments, the spacer is located at position 15 of the oligonucleotide. Example STMN2 AONs with one spacer are documented below in Table 7A.

TABLE 7A
Identification of STMN2 AONs with one spacer.
Here, each STMN2 AON has 2 segments, where at
least one of the segments has at most 11
linked nucleosides.

| | | | Sequence* |
|---|---|---|---|
| | | | (where X |
| | | | indicates |
| | | | a nucleo- |
| | | | side of |
| | | | the STMN2 |
| | | | parent |
| | | | oligonu- |
| | | | cleotide |
| | | | and S_{y} |
| | | | indicates |
| | | | presence |
| | | Se- | of |
| | | quence | a Spacer |
| | Relation | ID | where y |
| | to STMN2 | Number | denotes |
| | oligonu- | (SEQ | the |
| Sequence | cleotide | ID | position) |
| name | variant | NO) | (5′ → 3′) |
| STMN2 parent | N/A | 1522 | XXXXXXXXXXXXXX |
| oligonucleo- | | | XXXXXXXXXXX |
| tide | | | (25mer) |
| STMN2 Oligo- | Nucleo- | 1523 | XXXXXXXXXXXXXX |
| nucleotide | side at | | S₁₅XXXXXXXXXX |
| (25mer) with | position | | |
| Spacer at | 15 of | | |
| position 15 | 25mer is | | |
| (STMN2 | substi- | | |
| AON 25_sp15) | tuted with | | |
| | a spacer | | |
| STMN2 oligo- | N/A | 1524 | XXXXXXXXXXXXXX |
| nucleotide | | | XXXXXXXXX |
| variant | | | (23mer) |
| (23mer) | | | |
| STMN2 Oligo- | Nucleo- | 1525 | XXXXXXXXXXX |
| nucleotide | side at | | S₁₂XXXXXXXXXXX |
| (23mer) with | position | | |
| Spacer at | 12 of | | |
| position 12 | 23mer is | | |
| (STMN2 | substi- | | |
| AON 23_sp12) | tuted with | | |
| | a spacer | | |
| STMN2 oligo- | N/A | 1526 | XXXXXXXXXXXXXX |
| nucleotide | | | XXXXXXX |
| variant | | | (21mer) |
| (21mer) | | | |
| STMN2 Oligo- | Nucleo- | 1527 | XXXXXXXXXX |
| nucleotide | side at | | S₁₁XXXXXXXXXX |
| (21mer) with | position | | |
| Spacer at | 11 of | | |
| position 11 | 21mer is | | |
| (STMN2 | substi- | | |
| AON 21_sp11) | tuted with | | |
| | a spacer | | |
| STMN2 oligo- | N/A | 1528 | XXXXXXXXXXXXXX |
| nucleotide | | | XXXXX |
| variant | | | (19mer) |
| (19mer) | | | |
| STMN2 Oligo- | Nucleo- | 1529 | XXXXXXXXX |
| nucleotide | side at | | S₁₀XXXXXXXXX |
| (19mer) with | position | | |
| Spacer at | 10 of | | |
| position 10 | 19mer is | | |
| (STMN2 | substi- | | |
| AON 19_sp10) | tuted with | | |
| | a spacer | | |

* At least one nucleoside linkage of the nucleobase sequence is selected from a phosphorothioate linkage, an alkyl phosphate linkage, a phosphorodithioate linkage, a phosphotriester linkage,
an alkylphosphonate linkage, a 3-methoxypropyl phosphonate linkage, a methylphosphonate linkage, an aminoalkylphosphotriester linkage, an alkylene phosphonate linkage, a phosphinate linkage,
a phosphoramidate linkage, a phosphoramidothioate linkage, a phosphorodiamidate (e.g, comprising a phosphorodiamidate morpholino (PMO), 3’ amino ribose, or 5’ amino ribose) linkage, an
aminoalkylphosphoramidate linkage, a thiophosphoramidate linkage, a thionoalkylphosphonate linkage, a thionoalkylphosphotriester linkage, a thiophosphate linkage, a
selenophosphate linkage, and a boranophosphate linkage.

[0316] In various embodiments, STMN2 oligonucleotides include two spacers. In various embodiments, the inclusion of a spacer divides up the STMN2 oligonucleotide into three separate segments, where at least one of the segments is at most 7 linked nucleosides in length. Example STMN2 AONs with two spacers are documented below in Table 7B.

TABLE 7B
Identification of STMN2 AONs with two spacers. Here, each
STMN2 AON has 3 segments, where at least one of the
segments has at most 7 linked nucleosides.

| | | | Sequence* (where X |
|---|---|---|---|
| | | | indicates a nucleoside |
| | | Sequence | of the STMN2 parent |
| | | ID | oligonucleotide and S_{y} |
| | Relation to | Number | indicates presence of |
| | STMN2 parent | (SEQ ID | a Spacer where y denotes |
| Sequence name | oligonucleotide | NO) | the position) (5′ → 3′) |
| STMN2 parent | N/A | 1530 | XXXXXXXXXXXXXXXXXXXXXXXXX |
| oligonucleotide | | | |
| STMN2 | Nucleosides at | 1531 | XXXXXXXXXXS₁₁XXXXXXXXXXS₂₂XXX |
| Oligonucleotide | positions 11 and | | |
| with Spacers at | 22 are each | | |
| positions 11 and 22 | substituted with | | |
| (STMN2 AON | a spacer | | |
| 25_sp11sp22) | | | |
| STMN2 | Nucleosides at | 1532 | XXXXXXS₇XXXXXXS₁₄XXXXXXXXXXX |
| Oligonucleotide | positions 7 and | | |
| with Spacers at | 14 are each | | |
| positions 7 and 14 | substituted with | | |
| (STMN2 AON | a spacer | | |
| 25_sp7sp14) | | | |
| STMN2 | Nucleosides at | 1533 | XXXXXXXS₈XXXXXXXXXXS₁₉XXXXXX |
| Oligonucleotide | positions 8 and | | |
| with Spacers at | 19 are | | |
| positions 8 and 19 | substituted with | | |
| (STMN2 AON | spacers | | |
| 25_sp8sp19) | | | |
| STMN2 | Nucleosides at | 1534 | XXXXXXXS₈XXXXXS₁₄XXXXXXXXXXX |
| Oligonucleotide | positions 8 and | | |
| with Spacers at | 14 are | | |
| positions 8 and 14 | substituted with | | |
| (STMN2 AON | spacers | | |
| 25_sp8sp14) | | | |
| STMN2 | Nucleosides at | 1535 | XXXXXXXXS₉XXXXS₁₄XXXXXXXXXXX |
| Oligonucleotide | positions 9 and | | |
| with Spacers at | 14 are | | |
| positions 9 and 14 | substituted with | | |
| (STMN2 AON | spacers | | |
| 25_sp9sp14) | | | |
| STMN2 | Nucleosides at | 1536 | XXXXXXXXXS₁₀XXXS₁₄XXXXXXXXXXX |
| Oligonucleotide | positions 10 and | | |
| with Spacers at | 14 are | | |
| positions 10 and 14 | substituted with | | |
| (STMN2 AON | spacers | | |
| 25_sp10spM) | | | |
| STMN2 | Nucleosides at | 1537 | XXXXXXXXXXS₁₁XXS₁₄XXXXXXXXXXX |
| Oligonucleotide | positions 11 and | | |
| with Spacers at | 14 are | | |
| positions 11 and 14 | substituted with | | |
| (STMN2 AON | spacers | | |
| 25_sp11sp14) | | | |
| STMN2 | Nucleosides at | 1538 | XXXXXXXS₈XXXXXXS₁₅XXXXXXXXXX |
| Oligonucleotide | positions 8 and | | |
| with Spacers at | 15 are | | |
| positions 8 and 15 | substituted with | | |
| (STMN2 AON | spacers | | |
| 25_sp8sp15) | | | |
| STMN2 | Nucleosides at | 1539 | XXXXXXXXS₉XXXXXS₁₅XXXXXXXXXX |
| Oligonucleotide | positions 9 and | | |
| with Spacers at | 15 are | | |
| positions 9 and 15 | substituted with | | |
| (STMN2 AON | spacers | | |
| 25_sp9sp15) | | | |
| STMN2 | Nucleosides at | 1540 | XXXXXXXXXS₁₀XXXXS₁₅XXXXXXXXXX |
| Oligonucleotide | positions 10 and | | |
| with Spacers at | 15 are | | |
| positions 10 and 15 | substituted with | | |
| (STMN2 AON | spacers | | |
| 25_sp10sp15) | | | |
| STMN2 | Nucleosides at | 1541 | XXXXXXXXXXS₁₁XXXS₁₅XXXXXXXXXX |
| Oligonucleotide | positions 11 and | | |
| with Spacers at | 15 are | | |
| positions 11 and 15 | substituted with | | |
| (STMN2 AON | spacers | | |
| 25_sp11sp15) | | | |
| STMN2 | Nucleosides at | 1542 | XXXXXXXS₈XXXXXXXS₁₆XXXXXXXXX |
| Oligonucleotide | positions 8 and | | |
| with Spacers at | 16 are | | |
| positions 8 and 16 | substituted with | | |
| (STMN2 AON | spacers | | |
| 25_sp8sp16) | | | |
| STMN2 | Nucleosides at | 1543 | XXXXXXXXS₉XXXXXXS₁₆XXXXXXXXX |
| Oligonucleotide | positions 9 and | | |
| with Spacers at | 16 are | | |
| positions 9 and 16 | substituted with | | |
| (STMN2 AON | spacers | | |
| 25_sp9sp16) | | | |
| STMN2 | Nucleosides at | 1544 | XXXXXXXXXS₁₀XXXXXS₁₆XXXXXXXXX |
| Oligonucleotide | positions 10 and | | |
| with Spacers at | 16 are | | |
| positions 10 and 16 | substituted with | | |
| (STMN2 AON | spacers | | |
| 25_sp10sp16) | | | |
| STMN2 | Nucleosides at | 1545 | XXXXXXXXXXS₁₁XXXXS₁₆XXXXXXXXX |
| Oligonucleotide | positions 11 and | | |
| with Spacers at | 16 are | | |
| positions 11 and 16 | substituted with | | |
| (STMN2 AON | spacers | | |
| 25_sp11sp16) | | | |
| STMN2 | Nucleosides at | 1546 | XXXXXXXS₈XXXXXXXXS₁₇XXXXXXXX |
| Oligonucleotide | positions 8 and | | |
| with Spacers at | 17 are | | |
| positions 8 and 17 | substituted with | | |
| (STMN2 AON | spacers | | |
| 25_sp8sp17) | | | |
| STMN2 | Nucleosides at | 1547 | XXXXXXXXS₉XXXXXXXS₁₇XXXXXXXX |
| Oligonucleotide | positions 9 and | | |
| with Spacers at | 17 are | | |
| positions 9 and 17 | substituted with | | |
| (STMN2 AON | spacers | | |
| 25_sp9sp17) | | | |
| STMN2 | Nucleosides at | 1548 | XXXXXXXXXS₁₀XXXXXXS₁₇XXXXXXXX |
| Oligonucleotide | positions 10 and | | |
| with Spacers at | 17 are | | |
| positions 10 and 17 | substituted with | | |
| (STMN2 AON | spacers | | |
| 25_sp10sp17) | | | |
| STMN2 | Nucleosides at | 1549 | XXXXXXXXXXS₁₁XXXXXS₁₇XXXXXXXX |
| Oligonucleotide | positions 11 and | | |
| with Spacers at | 17 are | | |
| positions 11 and 17 | substituted with | | |
| (STMN2 AON | spacers | | |
| 25_sp11sp17) | | | |
| STMN2 | Nucleosides at | 1550 | XXXXXXXS₈XXXXXXXXXS₁₈XXXXXXX |
| Oligonucleotide | positions 8 and | | |
| with Spacers at | 18 are | | |
| positions 8 and 18 | substituted with | | |
| (STMN2 ATON | spacers | | |
| 25_sp8sp18) | | | |
| STMN2 | Nucleosides at | 1551 | XXXXXXXXS₉XXXXXXXXS₁₈XXXXXXX |
| Oligonucleotide | positions 9 and | | |
| with Spacers at | 18 are | | |
| positions 9 and 18 | substituted with | | |
| (STMN2 AON | spacers | | |
| 25_sp9sp18) | | | |
| STMN2 | Nucleosides at | 1552 | XXXXXXXXXS₁₀XXXXXXXS₁₈XXXXXXX |
| Oligonucleotide | positions 10 and | | |
| with Spacers at | 18 are | | |
| positions 10 and 18 | substituted with | | |
| (STMN2 AON | spacers | | |
| 25_sp10sp18) | | | |
| STMN2 | Nucleosides at | 1553 | XXXXXXXXXXS₁₁XXXXXXS₁₈XXXXXXX |
| Oligonucleotide | positions 11 and | | |
| with Spacers at | 18 are | | |
| positions 11 and 18 | substituted with | | |
| (STMN2 AON | spacers | | |
| 25_sp11sp18) | | | |
| STMN2 | Nucleosides at | 1554 | XXXXXXXXS₉XXXXXXXXXS₁₉XXXXXX |
| Oligonucleotide | positions 9 and | | |
| with Spacers at | 19 are | | |
| positions 9 and 19 | substituted with | | |
| (STMN2 AON | spacers | | |
| 25_sp9sp19) | | | |
| STMN2 | Nucleosides at | 1555 | XXXXXXXXXS₁₀XXXXXXXXS₁₉XXXXXX |
| Oligonucleotide | positions 10 and | | |
| with Spacers at | 19 are | | |
| positions 10 and 19 | substituted with | | |
| (STMN2 AON | spacers | | |
| 25_sp10sp19) | | | |
| STMN2 | Nucleosides at | 1556 | XXXXXXXXXXS₁₁XXXXXXXS₁₉XXXXXX |
| Oligonucleotide | positions 11 and | | |
| with Spacers at | 19 are | | |
| positions 11 and 19 | substituted with | | |
| (STMN2 AON | spacers | | |
| 25_sp11sp19) | | | |
| STMN2 | Nucleosides at | 1557 | XXXXXXXXS₉XXXXXXXXXXS₂₀XXXXX |
| Oligonucleotide | positions 9 and | | |
| with Spacers at | 20 are | | |
| positions 9 and 20 | substituted with | | |
| (STMN2 AON | spacers | | |
| 25_sp9sp20) | | | |
| STMN2 | Nucleosides at | 1558 | XXXXXXXXXS₁₀XXXXXXXXXS₂₀XXXXX |
| Oligonucleotide | positions 10 and | | |
| with Spacers at | 20 are | | |
| positions 10 and 20 | substituted with | | |
| (STMN2 AON | spacers | | |
| 25_sp10sp20) | | | |
| STMN2 | Nucleosides at | 1559 | XXXXXXXXXXS₁₁XXXXXXXXS₂₀XXXXX |
| Oligonucleotide | positions 11 and | | |
| with Spacers at | 20 are | | |
| positions 11 and 20 | substituted with | | |
| (STMN2 AON | spacers | | |
| 25_sp11sp20) | | | |
| STMN2 | Nucleosides at | 1560 | XXXXXXXXXS_{1O}XXXXXXXXXXS₂₁XXXX |
| Oligonucleotide | positions 10 and | | |
| with Spacers at | 21 are | | |
| positions 10 and 21 | substituted with | | |
| (STMN2 AON | spacers | | |
| 25_sp10sp21) | | | |
| STMN2 | Nucleosides at | 1561 | XXXXXXXXXXS₁₁XXXXXXXXXS₂₁XXXX |
| Oligonucleotide | positions 11 and | | |
| with Spacers at | 21 are | | |
| positions 11 and 21 | substituted with | | |
| (STMN2 AON | spacers | | |
| 25_sp11sp21) | | | |
| STMN2 | Nucleosides at | 1562 | XXXS₄XXXXXXXXXXS₁₅XXXXXXXXXX |
| Oligonucleotide | positions 4 and | | |
| with Spacers at | 15 are | | |
| positions 4 and 15 | substituted with | | |
| (STMN2 AON | spacers | | |
| 25_sp4sp15) | | | |
| STMN2 | Nucleosides at | 1563 | XXXXXXS₇XXXXXXXXXXXS₁₉XXXXXX |
| Oligonucleotide | positions 7 and | | |
| with Spacers at | 19 are | | |
| positions 7 and 19 | substituted with | | |
| (STMN2 AON | spacers | | |
| 25_sp7sp19) | | | |
| STMN2 | Nucleosides at | 1564 | XXXXXXS₇XXXXXXXXXXS₁₈XXXXXXX |
| Oligonucleotide | positions 7 and | | |
| with Spacers at | 18 are | | |
| positions 7 and 18 | substituted with | | |
| (STMN2 AON | spacers | | |
| 25_sp7sp18) | | | |
| STMN2 | Nucleosides at | 1565 | XXXXXXXXS₉XXXXXXXXXXXS₂₁XXXX |
| Oligonucleotide | positions 9 and | | |
| with Spacers at | 21 are | | |
| positions 9 and 21 | substituted with | | |
| (STMN2 AON | spacers | | |
| 25_sp9sp21) | | | |

* At least one nucleoside linkage of the nucleobase sequence is selected from a phosphorothioate linkage, an alkyl phosphate linkage, a phosphorodithioate linkage, a phosphotriester linkage,
an alkylphosphonate linkage, a 3-methoxypropyl phosphonate linkage, a methylphosphonate linkage, an aminoalkylphosphotriester linkage, an alkylene phosphonate linkage, a phosphinate linkage,
a phosphoramidate linkage, a phosphoramidothioate linkage, a phosphorodiamidate (e.g., comprising a phosphorodiamidate morpholino (PMO), 3’ amino ribose, or 5’ amino ribose) linkage, an
aminoalkylphosphoramidate linkage, a thiophosphoramidate linkage, a thionoalkylphosphonate linkage, a thionoalkylphosphotriester linkage, a thiophosphate linkage, a
selenophosphate linkage, and a boranophosphate linkage.

[0317] In various embodiments, STMN2 oligonucleotides include three spacers. The inclusion of three spacers divides up the STMN2 oligonucleotide into four separate segments. In various embodiments, the three spacers are located at different positions of the STMN2 oligonucleotide such that each of the segments of the STMN2 oligonucleotide are at most 7 linked nucleosides in length. Example STMN2 AONs with three spacers are documented below in Table 8.

TABLE 8
Identification of STMN2 AONs or AON variants with three spacers. Here, each
STMN2 AON has 4 segments, where each segment has at most 7 linked nucleosides.

| | | | Sequence* (where X indicates |
|---|---|---|---|
| | Relation | Sequence | a nucleoside of the STMN2 |
| | to STMN2 | ID | parent oligonucleotide and |
| | parent | Number | S_{y} indicates presence of a |
| | oligonu- | (SEQ | Spacer where y denotes the |
| Sequence name | cleotide | ID NO) | position) (5′ → 3′) |
| STMN2 | Nucleosides | 1566 | XXXXXXXS₈XXXXXXXS₁₆XXXXXXXS₂₄X |
| Oligonucleotide | at positions 8 | | |
| with Spacers at | and 16 and 24 | | |
| positions 8 and | are substituted | | |
| 16 and 24 (STMN2 | with spacers | | |
| AON | | | |
| 25 sp8sp16sp24) | | | |
| STMN2 | Nucleosides | 1567 | XXXXXXXS₈XXXXXXXS₁₆XXXXXXS₂₃XX |
| Oligonucleotide | at positions 8 | | |
| with Spacers at | and 16 and 23 | | |
| positions 8 and | are substituted | | |
| 16 and 23 (STMN2 | with spacers | | |
| AON | | | |
| 25 sp8sp16sp23) | | | |
| STMN2 | Nucleosides | 1568 | XS₂XXXXXXXS₁₀XXXXXXXS₁₈XXXXXXX |
| Oligonucleotide | at positions 2 | | |
| with Spacers at | and 10 and 18 | | |
| positions 2 and | are substituted | | |
| 10 and 18 (STMN2 | with spacers | | |
| AON | | | |
| 25 sp8sp16sp23) | | | |
| STMN2 | Nucleosides | 1569 | XXS₃XXXXXXS₁₀XXXXXXXS₁₈XXXXXXX |
| Oligonucleotide | at positions 3 | | |
| with Spacers at | and 10 and 18 | | |
| positions 3 and | are substituted | | |
| 10 and 18 (STMN2 | with spacers | | |
| AON | | | |
| 25 sp8sp16sp23) | | | |
| STMN2 | Nucleosides | 1570 | XXXS₄XXXXXXXS₁₂XXXXXXS₁₉XXXXXX |
| Oligonucleotide | at positions 4 | | |
| with Spacers at | and 12 and 19 | | |
| positions 4 and | are substituted | | |
| 12 and 19 (STMN2 | with spacers | | |
| AON | | | |
| 25 sp4sp12sp19) | | | |
| STMN2 | Nucleosides | 1571 | XXXXXXXS₈XXXXS₁₃XXXXS₁₈XXXXXXX |
| Oligonucleotide | at positions 8 | | |
| with Spacers at | and 13 and 18 | | |
| positions 8 and | are substituted | | |
| 13 and 18 (STMN2 | with spacers | | |
| AON | | | |
| 25 sp8sp13sp18) | | | |
| STMN2 | Nucleosides | 1572 | XXXXS₅XXXXXXXS₁₃XXXXXXXS₂₁XXXX |
| Oligonucleotide | at positions 5 | | |
| with Spacers at | and 13 and 21 | | |
| positions 5 and | are substituted | | |
| 13 and 21 (STMN2 | with spacers | | |
| AON | | | |
| 25 sp5sp13sp21) | | | |
| STMN2 | Nucleosides | 1573 | XXXXXXS₇XXXXXS₁₃XXXXXS₁₉XXXXXX |
| Oligonucleotide | at positions 7 | | |
| with Spacers at | and 13 and 19 | | |
| positions 7 and | are substituted | | |
| 13 and 19 (STMN2 | with spacers | | |
| AON | | | |
| 25 sp7sp13sp19) | | | |
| STMN2 | Nucleosides | 1574 | XXXXXS₆XXXXXXS₁₃XXXXXXS₂₀XXXXX |
| Oligonucleotide | at positions 6 | | |
| with Spacers at | and 13 and 20 | | |
| positions 6 and | are substituted | | |
| 13 and 20 (STMN2 | with spacers | | |
| AON | | | |
| 25 sp6sp13sp20) | | | |
| STMN2 | Nucleosides | 1575 | XXXXXXXS₈XXS₁₁XXXXXXXS₁₉XXXXXX |
| Oligonucleotide | at positions 8 | | |
| with Spacers at | and 11 and 19 | | |
| positions 8 and | are substituted | | |
| 11 and 19 (STMN2 | with spacers | | |
| AON | | | |
| 25 sp8sp11sp19) | | | |
| STMN2 | Nucleosides | 1576 | XXXXXXXS₈XXS₁₁XXXXS₁₆XXXXXXX |
| Oligonucleotide | at positions 8 | | |
| with Spacers at | and 11 and 16 | | |
| positions 8 and | are substituted | | |
| 11 and 16 (STMN2 | with spacers | | |
| AON | | | |
| 23 sp8sp11sp16) | | | |
| STMN2 | Nucleosides | 1577 | XXXXXXS₇XXXXXXS₁₄XXXXXXXS₂₂XXX |
| Oligonucleotide | at positions 7 | | |
| with Spacers at | and 14 and 22 | | |
| positions 7 and | are substituted | | |
| 14 and 22 (STMN2 | with spacers | | |
| AON | | | |
| 23 sp7sp14sp22) | | | |

*At least one nucleoside linkage of the nucleobase sequence is selected from a phosphorothioate linkage, an alkyl phosphate linkage, a phosphorodithioate linkage, a phosphotriester linkage, an alkylphosphonate linkage, a 3-methoxypropyl phosphonate linkage,
a methylphosphonate linkage, an aminoalkylphosphotriester linkage, an alkylene phosphonate linkage, a phosphinate linkage, a phosphoramidate linkage, a phosphoramidothioate linkage, a phosphorodiamidate (e.g., comprising a phosphorodiamidate merpholino (PMO),
3’ amino ribose, or 5’ amino ribose) linkage, an aminoalkylphosphoramidate linkage, a thiophosphoramidate linkage, a thionoalkylphosphonate linkage, a thionoalkylphosphotriester linkage, a thiophosphate linkage, a selenophosphate linkage, and a boranophosphate
linkage.

[0318] In various embodiments, STMN2 AONs with one or more spacers are reduced in length in comparison to the STMN2 AONs described above in Tables 7B and 8. For example, such STMN2 AONs may be STMN2 oligonucleotide variants with one or more spacers. In various embodiments, the STMN2 oligonucleotide variants with one or more spacers are 23mers, 21mers, or 19mers. In various embodiments, STMN2 oligonucleotide variants include two spacers such that the STMN2 oligonucleotide variant includes three segments that are divided up by the two spacers. In various embodiments, at least one of the three segments has at most 7 linked nucleosides. In various embodiments, each of the three segments has at most 7 linked nucleosides. Example STMN2 oligonucleotide variants with one or more spacers are shown below in Table 9.

TABLE 9
STMN2 AON variants with two spacers. Here, each STMN2 AON variant has 3
segments, where each segment has at most 7 linked nucleosides.

| | Relation | Sequence | Sequence* (where X indicates a |
|---|---|---|---|
| | to STMN2 | ID | nucleoside of the STMN2 oligonu- |
| | oligonu- | Number | cleotide variant and S_{y} indicates |
| Sequence | cleotide | (SEQ ID | presence of a Spacer where y |
| name | variant | NO) | denotes the position) (5′ → 3′) |
| STMN2 | N/A | 1578 | XXXXXXXXXXXXXXXXXXXXXXX (23mer) |
| oligonucleotide | | | |
| variant (23mer) | | | |
| STMN2 Variant | Nucleosides at | 1579 | XXXXXXXS₈XXXXXXXS₁₆XXXXXXX |
| Oligonucleotide | positions 8 and | | |
| (23mer) with | 16 are | | |
| Spacers at | substituted with | | |
| positions 8 and | spacers | | |
| 16 (STMN2 | | | |
| AON variant | | | |
| 23 sp8sp16) | | | |
| STMN2 | N/A | 1580 | XXXXXXXXXXXXXXXXXXXXX |
| oligonucleotide | | | (21mer) |
| variant (21mer) | | | |
| STMN2 Variant | Nucleosides at | 1581 | XXXXS₅XXXXXXS₁₂XXXXXXXXX |
| Oligonucleotide | positions 5 and | | |
| (21mer) with | 12 are | | |
| Spacers at | substituted with | | |
| positions 5 and | spacers | | |
| 12 (STMN2 | | | |
| AON variant | | | |
| 21 sp5sp12) | | | |
| STMN2 Variant | Nucleosides at | 1582 | XXXXXXXS₈XXXXXXXS₁₆XXXXX |
| Oligonucleotide | positions 8 and | | |
| (21mer) with | 16 are | | |
| Spacers at | substituted with | | |
| positions 8 and | spacers | | |
| 16 (STMN2 | | | |
| AON variant | | | |
| 21 sp8sp16) | | | |
| STMN2 Variant | Nucleosides at | 1583 | XXXXXS₆XXXXXXXS₁₄XXXXXXX |
| Oligonucleotide | positions 6 and | | |
| (21mer) with | 14 are | | |
| Spacers at | substituted with | | |
| positions 6 and | spacers | | |
| 14 (STMN2 | | | |
| AON variant | | | |
| 21 sp6sp14) | | | |
| STMN2 Variant | Nucleosides at | 1584 | XXXXXXXS₈XXXXXS₁₄XXXXXXX |
| Oligonucleotide | positions 8 and | | |
| (21mer) with | 14 are | | |
| Spacers at | substituted with | | |
| positions 8 and | spacers | | |
| 14 (STMN2 | | | |
| AON variant | | | |
| 21 sp8sp14) | | | |
| STMN2 Variant | Nucleosides at | 1585 | XXXXXS₆XXXXXXXXXXXXXS₂₀X |
| Oligonucleotide | positions 6 and | | |
| (21mer) with | 20 are | | |
| Spacers at | substituted with | | |
| positions 8 and | spacers | | |
| 14 (STMN2 | | | |
| AON variant | | | |
| 21 sp8sp14) | | | |
| STMN2 | N/A | 1586 | XXXXXXXXXXXXXXXXXXX |
| oligonucleotide | | | (19mer) |
| variant (19mer) | | | |
| STMN2 Variant | Nucleosides at | 1587 | XXXXS₅XXXXXXS₁₂XXXXXXX |
| Oligonucleotide | positions 5 and | | |
| (19mer) with | 12 are | | |
| Spacers at | substituted with | | |
| positions 5 and | spacers | | |
| 12 (STMN2 | | | |
| AON variant | | | |
| 19 sp5sp12) | | | |
| STMN2 Variant | Nucleosides at | 1588 | XXXXXXXS₈XXXXXXS₁₅XXXX |
| Oligonucleotide | positions 8 and | | |
| (19mer) with | 15 are | | |
| Spacers at | substituted with | | |
| positions 8 and | spacers | | |
| 15 (STMN2 | | | |
| AON variant | | | |
| 19 sp8sp15) | | | |

*At least one nucleoside linkage of the nucleobase sequence is selected from a phosphorothioate linkage, an alkyl phosphate linkage, a phosphorodithioate linkage, a phosphotriester linkage, an alkylphosphonate linkage, a 3-methoxypropyl phosphonate linkage,
a methylphosphonate linkage, an aminoalkylphosphotriester linkage, an alkylene phosphonate linkage, a phosphinate linkage, a phosphoramidate linkage, a phosphoramidothioate linkage, a phosphorodiamidate (e.g., comprising a phosphorodiamidate merpholino (PMO),
3’ amino ribose, or 5’ amino ribose) linkage, an aminoalkylphosphoramidate linkage, a thiophosphoramidate linkage, a thionoalkylphosphonate linkage, a thionoalkylphosphotriester linkage, a thiophosphate linkage, a selenophosphate linkage, and a boranophosphate
linkage.

### Performance of STMN2 Oligonucleotides

[0319] Generally, STMN2 oligonucleotides and/or STMN2 parent oligonucleotides (e.g., STMN2 oligonucleotides with sequences of any of SEQ ID NOs: 1-466, SEQ ID NO: 893-1338, SEQ ID NOs: 1342-1366, and SEQ ID NOs: 1392-1664) target STMN2 transcripts (for example, a STMN2 pre-mRNA comprising a cryptic exon) comprising a sequence that shares at least 90% 15 (e.g., 90%, 91%, 92%, 93%, 94%, 95%, 96%, 97%, 98%, 99%, or 100%) identity to SEQ ID NO: 1339 or SEQ ID NO: 1341 in order to increase, restore, rescue, or stabilize levels of expression of STMN2 mRNA that is capable of translation to produce a functional STMN2 protein (e.g., full length STMN2). In various embodiments, STMN2 AONs can exhibit at least a 20%, 30%, 40%, 50%, 60%, 70%, 80%, or 90% increase of full length STMN2 protein. In various embodiments, STMN2 AONs can exhibit at least a 100%, 200%, 300%, or 400% increase of full length STMN2 protein. In some embodiments, the percent increase of the full length STMN2 protein is an increase in comparison to a reduced level of full length STMN2 protein achieved using a TDP43 antisense oligonucleotide. For example, a TDP43 antisense oligonucleotide can be used to deplete full length STMN2 protein followed by increase of the full length STMN2 protein using a STMN2 AON.

[0320] In some embodiments, STMN2 AONs can exhibit at least a 10%, 20%, 30%, 40%, 50%, 60%, 70%, 80%, 90%, or 100% rescue of full length STMN2 protein. In some embodiments, the percent rescue of full length STMN2 refers to the % of full length STMN2 following depletion using a TDP43 antisense oligonucleotide and a treatment using STMN2 AONs in comparison to a negative control (e.g., cells that did not undergo depletion or treatment or cells that were treated with a vehicle solution).

### Modifications

[0321] A nucleoside is a base-sugar combination. The nucleobase (also known as base) portion of the nucleoside is normally a heterocyclic base moiety. Nucleotides are nucleosides that further include a phosphate group covalently linked to the sugar portion of the nucleoside. For those nucleosides that include a pentofuranosyl sugar, the phosphate group can be linked to the 2′, 3′ or 5′ hydroxyl moiety of the sugar. Oligonucleotides are formed through the covalent linkage of adjacent nucleosides to one another, to form a linear polymeric oligonucleotide. Within the oligonucleotide structure, the phosphate groups are commonly referred to as forming the internucleoside linkages of the oligonucleotide.

[0322] Modifications to antisense compounds encompass substitutions or changes to internucleoside linkages, sugar moieties, or nucleobases. Modified antisense compounds are often preferred over native forms because of desirable properties such as, for example, enhanced cellular uptake, enhanced affinity for nucleic acid target, increased stability in the presence of nucleases, or increased inhibitory activity.

[0323] Chemically modified nucleosides may also be employed to increase the binding affinity of a shortened or truncated antisense oligonucleotide for its target nucleic acid. Consequently, comparable results can often be obtained with shorter antisense compounds that have such chemically modified nucleosides.

### Modified Internucleoside Linkages

[0324] The naturally occurring internucleoside linkage of RNA and DNA is a 3′ to 5′ phosphodiester linkage. Antisense compounds having one or more modified, i.e. non-naturally occurring, internucleoside linkages are often selected over antisense compounds having naturally occurring internucleoside linkages because of desirable properties such as, for example, enhanced cellular uptake, enhanced affinity for target nucleic acids, and increased stability in the presence of nucleases.

[0325] Oligonucleotides having modified internucleoside linkages include internucleoside linkages that retain a phosphorus atom as well as internucleoside linkages that do not have a phosphorus atom. Representative phosphorus containing internucleoside linkages include, but are not limited to, phosphodiesters, phosphotriesters, methylphosphonates, phosphoramidate, and phosphorothioates. Methods of preparation of phosphorous-containing and non-phosphorous-containing linkages are well known.

[0326] In certain embodiments, antisense compounds targeted to a STMN2 nucleic acid comprise one or more modified internucleoside linkages. In certain embodiments, the modified internucleoside linkages are interspersed throughout the antisense compound. In certain embodiments, the modified internucleoside linkages are phosphorothioate linkages. In certain embodiments, each internucleoside linkage of an antisense compound is a phosphorothioate internucleoside linkage. In certain embodiments, the antisense compounds targeted to a STMN2 nucleic acid comprise at least one phosphodiester linkage and at least one phosphorothioate linkage.

### Modified Sugar Moieties

[0327] Antisense compounds can optionally contain one or more nucleosides wherein the sugar group has been modified. Such sugar modified nucleosides may impart enhanced nuclease stability, increased binding affinity, or some other beneficial biological property to the antisense compounds. In certain embodiments, nucleosides comprise chemically modified ribofuranose ring moieties. Examples of chemically modified ribofuranose rings include without limitation, addition of substituent groups (including 5′ and 2′ substituent groups, bridging of non-geminal ring atoms to form bicyclic nucleic acids (BNA), replacement of the ribosyl ring oxygen atom with S, N®, or C(R₁)(R₂) (R, R₁ and R₂ are each independently H, C₁-C₁₂ alkyl or a protecting group) and combinations thereof. Examples of chemically modified sugars include 2′-F-5′-methyl substituted nucleoside (see PCT International Application WO 2008/101157 Published on Aug. 21, 2008 for other disclosed 5′,2′-bis substituted nucleosides) or replacement of the ribosyl ring oxygen atom with S with further substitution at the 2′-position (see published U.S. Patent Application US2005-0130923, published on Jun. 16, 2005) or alternatively 5′-substitution of a BNA (see PCT International Application WO 2007/134181 Published on Nov. 22, 2007 wherein LNA is substituted with for example a 5′-methyl or a 5′-vinyl group).

[0328] Examples of nucleosides having modified sugar moieties include without limitation nucleosides comprising 5′-vinyl, 5′-methyl (R or 5), 4′-S, 2′-F, 2′-OCH₃, 2′-OCH₂CH₃, 2′-O CH₂ CH₂F and 2′-O(CH₂)₂OCH₃ substituent groups. The substituent at the 2′ position can also be selected from allyl, amino, azido, thio, O-allyl, O—C₁-C₁₀ alkyl, OCF₃, OCH₂F, O(CH₂)₂S CH₃, O(CH₂)₂—O—N(Rₘ)(Rₙ), O—CH₂—C(═O)—N(Rₘ)(Rₙ), and O—CH₂—C(═O)—N(R₁)—(CH₂)₂—N(Rₘ)(Rₙ)—, where each Rₗ, Rₘ and Rₙ is, independently, H or substituted or unsubstituted C₁-C₁₀ alkyl.

[0329] Additional examples of modified sugar moieties include a 2′-Ome modified sugar moiety, bicyclic sugar moiety, 2′-O-(2-methoxyethyl) (2′-MOE), 2′-deoxy-2′-fluoro nucleoside, 2′-fluoro-β-D-arabinonucleoside, locked nucleic acid (LNA), constrained ethyl 2′-4′-bridged nucleic acid (cEt), S-cEt, tcDNA, hexitol nucleic acids (HNA), and tricyclic analog (e.g., tcDNA).

[0330] As used herein, “bicyclic nucleosides” refer to modified nucleosides comprising a bicyclic sugar moiety. Examples of bicyclic nucleosides include without limitation nucleosides comprising a bridge between the 4′ and the 2′ ribosyl ring atoms. In certain embodiments, antisense compounds provided herein include one or more bicyclic nucleosides comprising a 4′ to 2′ bridge. Examples of such 4′ to 2′ bridged bicyclic nucleosides, include but are not limited to one of the formulae: 4′-(CH₂)—O-2′ (LNA); 4′-(CH₂)—S-2′; 4′-(CH₂)₂—O-2′ (ENA); 4′-CH(CH₃)—O-2′ and 4′-CH(CH₂OCH₃)—O-2′ (and analogs thereof see U.S. Pat. No. 7,399,845, issued on Jul. 15, 2008); 4′-C(CH₃)(CH₃)—O-2′ (and analogs thereof see published International Application WO/2009/006478, published Jan. 8, 2009); 4′-CH₂—N(OCH₃)-2′ (and analogs thereof see published International Application WO/2008/150729, published Dec. 11, 2008); 4′-CH₂—O—N(CH₃)-2′ (see published U.S. Patent Application US2004-0171570, published Sep. 2, 2004); 4′-CH₂—Ng-O-2′, wherein R is H, C₁-C₁₂ alkyl, or a protecting group (see U.S. Pat. No. 7,427,672, issued on Sep. 23, 2008); 4′-CH₂—C(H)(CH₃)-2′ (see Chattopadhyaya et al., J. Org. Chem., 2009, 74, 118-134); and 4′-CH₂—C—(═CH₂)-2′ (and analogs thereof see published International Application WO 2008/154401, published on Dec. 8, 2008).

[0331] Further reports related to bicyclic nucleosides can also be found in published literature (see for example: Singh et al., Chem. Commun., 1998, 4, 455-456; Koshkin et al., Tetrahedron, 1998, 54, 3607-3630; Wahlestedt et al., Proc. Natl. Acad. Sci. U.S.A., 2000, 97, 5633-5638; Kumar et al., Bioorg. Med. Chem. Lett., 1998, 8, 2219-2222; Singh et al., J. Org. Chem., 1998, 63, 10035-10039; Srivastava et al., J. Am. Chem. Soc., 2007, 129(26) 8362-8379; Elayadi et al., Curr. Opinion Invest. Drugs, 2001, 2, 558-561; Braasch et al., Chem. Biol., 2001, 8, 1-7; and Orum et al., Curr. Opinion Mol. Ther., 2001, 3, 239-243; U.S. Pat. Nos. 6,268,490; 6,525,191; 6,670,461; 6,770,748; 6,794,499; 7,034,133; 7,053,207; 7,399,845; 7,547,684; and 7,696,345; U.S. Patent Publication No. US2008-0039618; US2009-0012281; U.S. Patent Ser. No. 60/989,574; 61/026,995; 61/026,998; 61/056,564; 61/086,231; 61/097,787; and 61/099,844; Published PCT International applications WO 1994/014226; WO 2004/106356; WO 2005/021570; WO 2007/134181; WO 2008/150729; WO 2008/154401; and WO 2009/006478. Each of the foregoing bicyclic nucleosides can be prepared having one or more stereochemical sugar configurations including for example α-L-ribofuranose and β-D-ribofuranose (see PCT international application PCT/DK98/00393, published on Mar. 25, 1999 as WO 99/14226).

[0332] In certain embodiments, bicyclic sugar moieties of BNA nucleosides include, but are not limited to, compounds having at least one bridge between the 4′ and the 2′ position of the pentofuranosyl sugar moiety wherein such bridges independently comprises 1 or from 2 to 4 linked groups independently selected from —[C(Rₐ)(R_{b})]ₙ—, —C(Rₐ)═C(R_{b})—, —C(Rₐ)═N—, —C(═O)—, —C(═NRₐ)—, —C(═S)—O—, —Si(Rₐ)₂—, —S(═O)ₓ—, and —N(Rₐ)—;

wherein:
x is 0, 1, or 2;
n is 1, 2, 3, or 4;
each Rₐ and R_{b} is, independently, H, a protecting group, hydroxyl, C₁-C₁₂ alkyl, substituted C₁-C₁₂ alkyl, C₂-C₁₂ alkenyl, substituted C₂-C₁₂ alkenyl, C₂-C₁₂ alkynyl, substituted C₂-C₁₂ alkynyl, C₅-C₂₀ aryl, substituted C₅-C₂₀ aryl, heterocycle radical, substituted heterocycle radical, heteroaryl, substituted heteroaryl, C₅-C₇ alicyclic radical, substituted C₅-C₇ alicyclic radical, halogen, OJ₁, NJ₁J₂, SJ₁, N₃, COOJ₁, acyl (C(═O)—H), substituted acyl, CN, sulfonyl (S(═O)₂-J₁), or sulfoxyl (S(═O)-J₁); and
each J₁ and J₂ is, independently, H, C₁-C₁₂ alkyl, substituted C₁-C₁₂ alkyl, C₂-C₁₂ alkenyl, substituted C₂-C₁₂ alkenyl, C₂-C₁₂ alkynyl, substituted C₂-C₁₂ alkynyl, C₅-C₂₀ aryl, substituted C₅-C₂₀ aryl, acyl (C(═O)—H), substituted acyl, a heterocycle radical, a substituted heterocycle radical, C₁-C₁₂ aminoalkyl, substituted C₁-C₁₂ aminoalkyl or a protecting group.

[0333] In certain embodiments, the bridge of a bicyclic sugar moiety is —[C(Rₐ)(R_{b})]ₙ—, —[—[C(Rₐ)(R_{b})]ₙO—, —C(RₐR_{b})—N®—O— or —C(RₐR_{b})—O—N®-. In certain embodiments, the bridge is 4′-CH₂-2′, 4′-(CH₂)₂-2′, 4′-(CH₂)₃-2′, 4′-CH₂—O-2′, 4′-(CH₂)₂—O-2′, 4′-CH₂—O—N®-2′ and 4′-CH₂—N®—O-2′- wherein each R is, independently, H, a protecting group or C₁-C₁₂ alkyl, each Rₐ and R_{b} is, independently, H, a protecting group, hydroxyl, C₁-C₁₂ alkyl, substituted C₁-C₁₂ alkyl, C₂-C₁₂ alkenyl, substituted C₂-C₁₂ alkenyl, C₂-C₁₂ alkynyl, substituted C₂-C₁₂ alkynyl, C₅-C₂₀ aryl, substituted C₅-C₂₀ aryl, heterocycle radical, substituted heterocycle radical, heteroaryl, substituted heteroaryl, C₅-C₇ alicyclic radical, substituted C₅-C₇ alicyclic radical, halogen, OJ₁, NJ₁J₂, SJ₁, N₃, COOJ₁, acyl (C(═O)—H), substituted acyl, CN, sulfonyl (S(═O)₂-J₁), or sulfoxyl (S(═O)-J₁); each J₁ and J₂ is, independently, H, C₁-C₁₂ alkyl, substituted C₁-C₁₂ alkyl, C₂-C₁₂ alkenyl, substituted C₂-C₁₂ alkenyl, C₂-C₁₂ alkynyl, substituted C₂-C₁₂ alkynyl, C₅-C₂₀ aryl, substituted C₅-C₂₀ aryl, acyl (C(═O)—H), substituted acyl, a heterocycle radical, a substituted heterocycle radical, C₁-C₁₂ aminoalkyl, substituted C₁-C₁₂ aminoalkyl or a protecting group; and R is H, C₁-C₁₂ alkyl, or a protecting group (see U.S. Pat. No. 7,427,672, issued on Sep. 23, 2008).

[0334] In certain embodiments, bicyclic nucleosides are further defined by isomeric configuration. For example, a nucleoside comprising a 4′-2′ methylene-oxy bridge, may be in the α-L configuration or in the β-D configuration. Previously, α-L-methyleneoxy (4′-CH₂—O-2′) BNA's have been incorporated into antisense oligonucleotides that showed antisense activity (Frieden et al., Nucleic Acids Research, 2003, 21, 6365-6372).

[0335] In certain embodiments, bicyclic nucleosides include, but are not limited to, α-L-methyleneoxy (4′-CH₂—O-2′) BNA, β-D-methyleneoxy (4′-CH₂—O-2′) BNA, ethyleneoxy (4′-(CH₂)₂—O-2) BNA, aminooxy (4′-CH₂—O—N®-2′) BNA, 130yrrolid (4′-CH₂—N®—O-2′) BNA, methyl(methyleneoxy) (4′-CH(CH₃)—O-2′) BNA, methylene-thio (4′-CH₂—S-2′) BNA, methylene-amino (4′-CH₂—N®-2′) BNA, methyl carbocyclic (4′-CH₂—CH(CH₃)-2′) BNA, and propylene carbocyclic (4′-(CH₂)₃-2′) BNA; wherein R is H, C₁-C₁₂ alkyl, or a protecting group (see U.S. Pat. No. 7,427,672, issued on Sep. 23, 2008).

[0336] The present disclosure provide, in some embodiments, methods for treating, ameliorating, or preventing a neurological disease and/or a neuropathy further include methods of administering, to a patient, a pharmaceutically acceptable composition, for example, a pharmaceutically acceptable formulation that includes one or more STMN2 oligonucleotides. STMN2 oligonucleotides can increase, restore, or stabilize STMN2 activity, for example, STMN2 activity, and/or levels of STMN2 expression, for example, STMN2 mRNA and/or protein expression.

[0337] The present disclosure also provides pharmaceutical compositions comprising a STMN2 oligonucleotide formulated together with one or more pharmaceutically or cosmetically acceptable excipients. These formulations include those suitable for oral, sublingual, intratracheal, intranasal, transdermal, pulmonary, intrathecal, intrathalamic, intracisternal, intracerebroventricular, parenteral (e.g., subcutaneous, intramuscular, intradermal, intraduodenal, or intravenous) administration, transmucosal (e.g., buccal, vaginal, and rectal), or for topical use, e.g., as part of a composition suitable for applying topically to skin and/or mucous membrane, for example, a composition in the form of a gel, a paste, a wax, a cream, a spray, a liquid, a foam, a lotion, an ointment, a topical solution, a transdermal patch, a powder, a vapor, or a tincture. Although the most suitable form of administration in any given case will depend on the degree and severity of the condition being treated and on the nature of the particular STMN2 oligonucleotide being used.

[0338] The present disclosure also provides a pharmaceutical composition comprising a STMN2 oligonucleotide or a pharmaceutically acceptable salt thereof (for example, a STMN2 AON that includes a sequence of any of SEQ ID NOs: 1-466, SEQ ID NO: 893-1338, SEQ ID NOs: 1342-1366, and SEQ ID NOs: 1392-1664).

[0339] The present disclosure also provides methods that include the use of pharmaceutical compositions comprising a STMN2 AON is formulated together with one or more pharmaceutically acceptable excipients. Exemplary compositions provided herein include compositions comprising a STMN2 AON, and one or more pharmaceutically acceptable excipients. Formulations include those suitable for oral, sublingual, intratracheal, intranasal, transdermal, pulmonary, intrathecal, intrathalamic, intracisternal, intracerebroventricular, parenteral (e.g., subcutaneous, intramuscular, intradermal, intraduodenal, or intravenous) administration, transmucosal (e.g., buccal, vaginal, and rectal), or for topical use. The most suitable form of administration in any given case will depend on the clinical symptoms, complications, or biochemical indicia of the state, disorder, disease, or condition that one is trying to prevent in a subject; the state, disorder, disease, or condition one is trying to prevent in a subject; and/or on the nature of the particular compound and/or the composition being used.

### Additional Chemically Modified STMN2 Oligonucleotides

[0340] STMN2 AONs described herein, can include chemically modified nucleosides, including modified ribonucleosides and modified deoxyribonucleosides. Chemically modified nucleosides include, but are not limited to, uracil, uracine, uridine, 2′-O-(2-methoxyethyl) modifications, for example, 2′-O-(2-methoxyethyl)guanosine, 2′-O-(2-methoxyethyl)adenosine, 2′-O-(2-methoxyethyl)cytosine, and 2′-O-(2-methoxyethyl)thymidine. In certain embodiments, mixed modalities, e.g., a combination of a STMN2 peptide nucleic acid (PNA) and a STMN2 locked nucleic acid (LNA). Chemically modified nucleosides also include, but are not limited to, locked nucleic acids (LNAs), 2′-O-methyl, 2′-fluoro, and 2′-fluoro-β-D-arabinonucleotide (FANA), and Fluoro Cyclohexenyl nucleic acid (F-CeNA) modifications. Chemically modified nucleosides that can be included in STMN2 AONs described herein are described in Johannes and Lucchino, (2018) “Current Challenges in Delivery and Cytosolic Translocation of Therapeutic RNAs” Nucleic Acid Ther. 28(3): 178-93; Rettig and Behlke, (2012) “Progress toward in vivo use of siRNAs-II” Mol Ther 20:483-512; and Khvorova and Watts, (2017) “The chemical evolution of oligonucleotide therapies of clinical utility” Nat Biotechnol., 35(3):238-48, the contents of each of which are incorporated by reference herein.

[0341] STMN2 AONs described herein can include chemical modifications that promote stabilization of an oligonucleotide's terminal 5′-phosphate and phosphatase-resistant analogs of 5′-phosphate. Chemical modifications that promote oligonucleotide terminal 5′-phosphate stabilization or which are phosphatase-resistant analogs of 5′-phosphate include, but are not limited to, 5′-methyl phosphonate, 5′-methylenephosphonate, 5′-methylenephosphonate analogs, 5′-E-vinyl phosphonate (5′-E-VP), 5′-phosphorothioate, and 5′-C-methyl analogs. Chemical modifications that promote AON terminal 5′-phosphate stabilization and phosphatase-resistant analogues of 5′-phosphate are described in Khvorova and Watts, (2017) “The chemical evolution of oligonucleotide therapies of clinical utility” Nat Biotechnol., 35(3):238-48, the contents of which are incorporated by reference herein.

[0342] In some embodiments described herein, STMN2 AONs described herein can include chemically modified nucleosides, for example, 2′ O-methyl ribonucleosides, for example, 2′ O-methyl cytidine, 2′ O-methyl guanosine, 2′ O-methyl uridine, and/or 2′ O-methyl adenosine. STMN2 AONs described herein can include one or more chemically modified bases, including a 5-methylpyrimidine, for example, 5-methylcytosine, and/or a 5-methylpurine, for example, 5-methylguanine. Chemically modified bases can further include pseudo-uridine or 5′methoxyuridine. STMN2 AONs described herein can include any of the following chemically modified nucleosides: 5-methyl-2′-O-methylcytidine, 5-methyl-2′-O-methylthymidine, 5-methylcytidine, 5-methyluridine, and/or 5-methyl 2′-deoxycytidine.

[0343] STMN2 AONs described herein can include a phosphate backbone where one or more of the oligonucleoside linkages is a phosphate linkage. STMN2 AONs described herein may include a modified oligonucleotide backbone, where one or more of the nucleoside linkages of the sequence is selected from the group consisting of a phosphorothioate linkage, a phosphorodithioate linkage, a phosphotriester linkage, an alkylphosphonate linkage, a 3-methoxypropyl phosphonate linkage, an aminoalkylphosphotriester linkage, an alkylene phosphonate linkage, a phosphinate linkage, a phosphoramidate linkage, a phosphoramidothioate linkage, a thiophosphorodiamidate linkage, a phosphorodiamidate (e.g., comprising a phosphorodiamidate morpholino (PMO), 3′ amino ribose, or 5′ amino ribose) linkage, an aminoalkylphosphoramidate linkage, a thiophosphoramidate linkage, a thionoalkylphosphonate linkage, a thionoalkylphosphotriester linkage, a thiophosphate linkage, a selenophosphate linkage, and a boranophosphate linkage. In some embodiments of STMN2 AONs described herein, at least one (i.e., one or more) internucleoside linkage of the oligonucleotide is a phosphorothioate linkage. For example, in some embodiments of STMN2 AONs described herein, one, two, three, or more internucleoside linkages of the oligonucleotide is a phosphorothioate linkage. In preferred embodiments of STMN2 AONs described herein, all internucleoside linkages of the oligonucleotide are phosphorothioate linkages. Thus, in some embodiments, all of the nucleotide linkages of a STMN2 AON of any of SEQ ID NOs: 1-466, SEQ ID NO: 893-1338, SEQ ID NOs: 1342-1366, and SEQ ID NOs: 1392-1664 are phosphorothioate linkages. In some embodiments, one or more of the nucleotide linkages of a STMN2 AON of any of SEQ ID NOs: 1-466, SEQ ID NO: 893-1338, SEQ ID NOs: 1342-1366, and SEQ ID NOs: 1392-1664 are phosphorothioate linkages.

[0344] In various embodiments, nucleotide linkages of STMN2 AON described herein such as any of SEQ ID NOs: 1-466, SEQ ID NO: 893-1338, SEQ ID NOs: 1342-1366, and SEQ ID NOs: 1392-1664 include a mix of phosphodiester and phosphorothioate linkages.

[0345] In some embodiments, nucleoside linkages linking a base at position 3 of a STMN2 AON described herein are phosphodiester bonds. For example, the base at position 3 may be linked to each adjacent base (e.g., preceding base and succeeding base) through a phosphodiester bond. An example 25mer STMN2 AON with phosphodiester bonds linking the base at position 3 can be denoted as:

XXoDoXXXXXXXXXXXXXXXXXXXXXX

where “o” represents a phosphodiester bond and “D” represents the base at position 3. Any nucleobase in the AON can be a nucleobase analog.

[0346] In some embodiments, one of the nucleoside linkages linking a base at position 3 of a STMN2 AON described herein is a phosphodiester bond. For example, the base at position 3 may be linked to either the preceding base or the succeeding base through a phosphodiester bond. An example 25mer STMN2 AON with a phosphodiester bond linking the base at position 3 to a preceding base can be denoted as:

XXoDXXXXXXXXXXXXXXXXXXXXXX

where “o” represents a phosphodiester bond and “D” represents the base at position 3. Any nucleobase in the AON can be a nucleobase analog.

[0347] An example 25mer STMN2 AON with a phosphodiester bond linking the base at position 3 to a succeeding base can be denoted as:

XXDoXXXXXXXXXXXXXXXXXXXXXX

where “o” represents a phosphodiester bond and “D” represents the base at position 3. Any nucleobase in the AON can be a nucleobase analog.

[0348] In various embodiments, in addition to one of the nucleoside linkages linking a base at position 3 of a STMN2 AON described herein being a phosphodiester bond, the STMN2 AON further includes two spacers. The two spacers can be positioned in the STMN2 AON such that the STMN2 AON includes a segment with at most 7 linked nucleosides. An example 25mer STMN2 AON with two spacers and with a phosphodiester bond linking the base at position 3 to a preceding base can be denoted as:

XxoDS₁XXXXXXXXXS₂XXXXXXXXXXX

where “S₁” represents a first spacer, “S₂” represents a second spacer, “o” represents a phosphodiester bond and “D” represents the base at position 3. Any nucleobase in the AON can be a nucleobase analog.

[0349] An example 25mer STMN2 AON with two spacers and with a phosphodiester bond linking the base at position 3 to a succeeding base can be denoted as:

XXDoXXXXXXXS₁XXXXXXXXXS₂XXXX

where “S₁” represents a first spacer, “S₂” represents a second spacer, “o” represents a phosphodiester bond and “D” represents the base at position 3. Any nucleobase in the AON can be a nucleobase analog.

[0350] In some embodiments, nucleoside linkages linking a base at position 4 of a STMN2 AON described herein are phosphodiester bonds. For example, the base at position 4 may be linked to each adjacent base (e.g., preceding base and succeeding base) through a phosphodiester bond. An example 25mer STMN2 AON with phosphodiester bonds linking the base at position 4 can be denoted as:

XXXoDoXXXXXXXXXXXXXXXXXXXXX

where “o” represents a phosphodiester bond and “D” represents the base at position 4. Any nucleobase in the AON can be a nucleobase analog.

[0351] In some embodiments, one of the nucleoside linkages linking a base at position 4 of a STMN2 AON described herein is a phosphodiester bond. For example, the base at position 4 may be linked to either the preceding base or the succeeding base through a phosphodiester bond. An example 25mer STMN2 AON with a phosphodiester bond linking the base at position 4 to a preceding base can be denoted as:

XXXoDXXXXXXXXXXXXXXXXXXXXX

where “o” represents a phosphodiester bond and “D” represents the base at position 4. Any nucleobase in the AON can be a nucleobase analog.

[0352] An example 25mer STMN2 AON with a phosphodiester bond linking the base at position 4 to a succeeding base can be denoted as:

XXXDoXXXXXXXXXXXXXXXXXXXXX

where “o” represents a phosphodiester bond and “D” represents the base at position 4. Any nucleobase in the AON can be a nucleobase analog.

[0353] In some embodiments, nucleoside linkages linking both bases at position 3 and position 4 of a STMN2 AON described herein are phosphodiester bonds. For example, the base at position 3 may be linked to each adjacent base (e.g., preceding base and succeeding base) through a phosphodiester bond, and the base at position 4 may be linked to each adjacent base (e.g., preceding base and succeeding base) through a phosphodiester bond. An example 25mer STMN2 AON with phosphodiester bonds linking the bases at positions 3 and 4 can be denoted as:

XXoDoEoXXXXXXXXXXXXXXXXXXXXX

where “o” represents a phosphodiester bond, “D” represents the base at position 3, and “E” represents the base at position 4. In various embodiments, all other bases of the STMN2 AON are linked through phosphorothioate bonds. Any nucleobase in the AON can be a nucleobase analog.

[0354] In various embodiments, STMN2 AON described herein include one or more spacers and phosphodiester bonds are located relative to the one or more spacers. In some embodiments, the Y number of bases immediately preceding a spacer are linked through phosphodiester bonds. In various embodiments, Y is one, two, three, four, five, six, seven, eight, nine, ten, eleven, or twelve bases. In particular embodiments, Y is two bases. For example, if the spacer is located at position 15, the bases at positions 13 and 14 of the STMN2 AON are each linked to their respective adjacent bases through phosphodiester bonds. As described herein, the spacer can be located at various positions in the STMN2 AON and therefore, the 2 bases immediately preceding the spacer can vary within the STMN2 AON depending on where the spacer is situated.

[0355] In various embodiments, the STMN2 AON may include more than one spacer. In some embodiments, only one of the spacers has Y number of bases immediately preceding the spacer that are linked through phosphodiester bonds. In such embodiments, the other spacers are linked to respective preceding bases through phosphorothioate bonds. In various embodiments, two of the spacers have Y number of bases immediately preceding the spacers that are linked through phosphodiester bonds. In various embodiments, each of the spacers in the STMN2 AON have Y number of bases immediately preceding the spacers that are linked through phosphodiester bonds. In various embodiments, all other bases of the STMN2 AON are linked through phosphorothioate bonds.

[0356] In some embodiments, Y number of bases immediately preceding a spacer and Z number of bases immediately succeeding a spacer are linked through phosphodiester bonds. In various embodiments, Y is one, two, three, four, five, six, seven, eight, nine, ten, eleven, or twelve bases. In various embodiments, Z is one, two, three, four, five, six, seven, eight, nine, ten, eleven, or twelve bases. Y and Z can be independent of each other. In particular embodiments, Y is one base and Z is one base. For example, if the spacer is located at position 15, the bases at positions 14 and 16 of the STMN2 AON are each linked to their respective adjacent bases through phosphodiester bonds. To provide an example, such a STMN2 AON (e.g., 25mer) can be denoted as:

XXXXXXXXXXXXXoDoSoEoXXXXXXXXX

where “S” represents a spacer, “o” represents a phosphodiester bond, “D” represents a base immediately preceding the spacer, and “E” represents the base immediately succeeding the spacer. Any nucleobase in the AON can be a nucleobase analog.

[0357] As described herein, the spacer can be located at various positions in the STMN2 AON and therefore, the bases immediately preceding or immediately succeeding the spacer can vary within the STMN2 AON depending on where the spacer is situated.

[0358] In various embodiments, the STMN2 AON may include more than one spacer. In some embodiments, only one of the spacers has Y number of bases immediately preceding the spacer and Z number of bases immediately succeeding the spacer that are linked through phosphodiester bonds. In such embodiments, the other spacers of the STMN2 AON are linked to respective preceding and succeeding bases through phosphorothioate bonds. To provide an example, such a STMN2 AON (e.g., 25mer) can be denoted as:

XXXXoDoS₁oEoXXXXXXXXXXXS₂XXXXXX

where “S₁” represents a first spacer, “S₂” represents a second spacer, “o” represents a phosphodiester bond, “D” represents a base immediately preceding the spacer, and “E” represents the base immediately succeeding the spacer. Any nucleobase in the AON can be a nucleobase analog.

[0359] As another example, such a STMN2 AON (e.g., 25mer) can be denoted as:

XXXXXS₁XXXXXXXXXXXoDoS₂oDoXXXXX

where “S₁” represents a first spacer, “S₂” represents a second spacer, “o” represents a phosphodiester bond, “D” represents a base immediately preceding the spacer, and “E” represents the base immediately succeeding the spacer. Any nucleobase in the AON can be a nucleobase analog.

[0360] In some embodiments, one of the spacers is linked to the immediately preceding base through a phosphodiester bond. For example, a STMN2 AON includes a first spacer that is linked to the immediately preceding base through a phosphodiester bond, which can be denoted as:

XXXXXXoS₁XXXXXXXXXXXS₂XXXXXX

where “S₁” represents a first spacer, “S₂” represents a second spacer, “o” represents a phosphodiester bond. Any nucleobase in the AON can be a nucleobase analog.

[0361] As another example, a STMN2 AON includes a second spacer that is linked to the immediately preceding base through a phosphodiester bond, which can be denoted as:

XXXXXXS₁XXXXXXXXXXXoS₂XXXXXX

where “S₁” represents a first spacer, “S₂” represents a second spacer, “o” represents a phosphodiester bond. Any nucleobase in the AON can be a nucleobase analog.

[0362] In various embodiments, the STMN2 AON may be a AON variant (e.g., a 23mer, a 21mer, or a 19mer) where one of the spacers is linked to the immediately preceding base through a phosphodiester bond. For example, the STMN2 AON may be a 21mer with a first spacer that is linked to the immediately preceding base through a phosphodiester bond, which can be denoted as:

XXXXXXXoS₁XXXXXS₂XXXXXXX

where “S₁” represents a first spacer, “S₂” represents a second spacer, “o” represents a phosphodiester bond. Any nucleobase in the AON can be a nucleobase analog.

[0363] As another example, the STMN2 AON may be a 21mer with a second spacer that is linked to the immediately preceding base through a phosphodiester bond, which can be denoted as:

XXXXXXXS₁XXXXXoS₂XXXXXXX

where “S₁” represents a first spacer, “S₂” represents a second spacer, “o” represents a phosphodiester bond. Any nucleobase in the AON can be a nucleobase analog.

[0364] In some embodiments, the STMN2 AON may be a AON variant (e.g., a 23mer, a 21mer, or a 19mer) where one of the spacers is linked to the immediately preceding base through a phosphodiester bond and the immediately preceding base is further linked to the preceding base through a phosphodiester bond. An example 21mer STMN2 AON can be denoted as:

XXXEoDoS₁XXXXXXS₂XXXXXXX

where “S₁” represents a first spacer, “S₂” represents a second spacer, “o” represents a phosphodiester bond, “D” represents the base immediately preceding S₁ and “E” represents the base immediately preceding “D.” Any nucleobase in the AON can be a nucleobase analog.

[0365] As another example, a 21mer STMN2 AON can be denoted as:

XXXXXS₁XXXXEoDoS₂XXXXXXX

where “S₁” represents a first spacer, “S₂” represents a second spacer, “o” represents a phosphodiester bond, “D” represents the base immediately preceding S₂ and “E” represents the base immediately preceding “D.” Any nucleobase in the AON can be a nucleobase analog.

[0366] In some embodiments, the STMN2 AON may be a AON variant (e.g., a 23mer, a 21mer, or a 19mer) where a base that immediately precedes a first spacer is linked to another base through a phosphodiester bond. The base that immediately precedes the first spacer may be linked to the first spacer through a non-phosphodiester bond, such as a phosphorothioate bond. Additionally a second spacer is linked to an immediately preceding base through a phosphodiester bond. An example of a 21mer STMN2 AON can be denoted as:

XXXEoDS₁XXXXXXoS₂XXXXXXX

where “S₁” represents a first spacer, “S₂” represents a second spacer, “o” represents a phosphodiester bond, “D” represents the base immediately preceding S₁ and “E” represents the base immediately preceding “D.” Here, the base “D” is linked to the first spacer S₁ through a non-phosphodiester bond (e.g., phosphorothioate bond). Additionally, the base “D” is linked to base “E” through a phosphodiester bond. The second spacer S₂ is linked to an immediately preceding base through a phosphodiester bond. Any nucleobase in the AON can be a nucleobase analog.

[0367] Another example of such a 21mer STMN2 AON can be denoted as:

XXXXXoS₁XXXXEoDS₂XXXXXXX

where “S₁” represents a first spacer, “S₂” represents a second spacer, “o” represents a phosphodiester bond, “D” represents the base immediately preceding S₂ and “E” represents the base immediately preceding “D.” Here, the base “D” is linked to the second spacer S₂ through a non-phosphodiester bond (e.g., phosphorothioate bond). Additionally, the base “D” is linked to base “E” through a phosphodiester bond. The first spacer S₁ is linked to an immediately preceding base through a phosphodiester bond. Any nucleobase in the AON can be a nucleobase analog.

[0368] In some embodiments, one of the spacers is linked to the immediately succeeding base through a phosphodiester bond. For example, a STMN2 AON includes a first spacer that is linked to the immediately succeeding base through a phosphodiester bond, which can be denoted as:

XXXXXXS₁oXXXXXXXXXXXS₂XXXXXX

where “S₁” represents a first spacer, “S₂” represents a second spacer, “o” represents a phosphodiester bond. Any nucleobase in the AON can be a nucleobase analog.

[0369] As another example, a STMN2 AON includes a second spacer that is linked to the immediately succeeding base through a phosphodiester bond, which can be denoted as:

XXXXXXS₁XXXXXXXXXXXS₂oXXXXXX

where “S₁” represents a first spacer, “S₂” represents a second spacer, “o” represents a phosphodiester bond. Any nucleobase in the AON can be a nucleobase analog.

[0370] In various embodiments, the STMN2 AON may be a AON variant (e.g., a 23mer, a 21mer, or a 19mer) where one of the spacers is linked to the immediately succeeding base through a phosphodiester bond. For example, the STMN2 AON may be a 21mer with a first spacer that is linked to the immediately succeeding base through a phosphodiester bond, which can be denoted as:

XXXXXXXS₁oXXXXXS₂XXXXXXX

where “S₁” represents a first spacer, “S₂” represents a second spacer, “o” represents a phosphodiester bond. Any nucleobase in the AON can be a nucleobase analog.

[0371] As another example, the STMN2 AON may be a 21mer with a second spacer that is linked to the immediately succeeding base through a phosphodiester bond, which can be denoted as:

XXXXXXXS₁XXXXXS₂oXXXXXXX

where “S₁” represents a first spacer, “S₂” represents a second spacer, “o” represents a phosphodiester bond. Any nucleobase in the AON can be a nucleobase analog.

[0372] In various embodiments, two of the spacers have Y number of bases immediately preceding the spacers and Z number of bases immediately succeeding the spacers that are linked through phosphodiester bonds. In various embodiments, each of the spacers in the STMN2 AON have Y number of bases immediately preceding the spacers and Z number of bases immediately succeeding the spacers that are linked through phosphodiester bonds. An example of such a STMN2 AON (e.g., 25mer) can be denoted as:

XXXXoDoS₁oEoXXXXXXXXXXoFoS₂oHoXXXXX

where “S₁” represents a first spacer, “S₂” represents a second spacer, “o” represents a phosphodiester bond, “D” represents a base immediately preceding the first spacer, “E” represents the base immediately succeeding the first spacer, “F” represents a base immediately preceding the second spacer, and “H” represents the base immediately succeeding the second spacer. In various embodiments, all other bases of the STMN2 AON are linked through phosphorothioate bonds. Any nucleobase in the AON can be a nucleobase analog.

[0373] In various STMN2 AON includes two or more spacers and a range of bases located between the two spacers are linked through phosphodiester bonds. In various embodiments, the range of bases include two, three, four, five, six, or seven bases linked through phosphodiester bonds. In particular embodiments, the range of bases include two bases linked through phosphodiester bonds. In particular embodiments, the range of bases include four bases linked through phosphodiester bonds. In various embodiments, all other bases of the STMN2 AON are linked through phosphorothioate bonds. Any nucleobase in the AON can be a nucleobase analog.

[0374] In various embodiments, the range of bases linked through phosphodiester bonds are positioned Y number of bases succeeding the first spacer and Z number of preceding the second spacer. In various embodiments, Y is one, two, three, four, five, six, or seven bases. In various embodiments, Z is one, two, three, four, five, six, or seven bases. Y and Z can be independent on each other. Any nucleobase in the AON can be a nucleobase analog.

[0375] In particular embodiments, Y is five bases and Z is four bases. To provide an example, such a STMN2 AON (e.g., 25mer) can be denoted as:

XXXXXXXXS₁XXXXoDoEoFoHoXXXS₂XXXX

where “S₁” represents a first spacer, “S₂” represents a second spacer, and “o” represents a phosphodiester bond. The bases “D,” “E,” “F,” and “H” represent the range of bases that are linked through phosphodiester bonds. In this example, the range of bases is located five bases after the first spacer (e.g., D is positioned five bases after the first spacer) and the range of bases is located four bases preceding the second spacer (e.g., H is positioned four bases before the second spacer). Any nucleobase in the AON can be a nucleobase analog.

[0376] In particular embodiments, Y is four bases and Z is three bases. To provide an example, such a STMN2 AON (e.g., 23mer) can be denoted as:

XXXXXXXS₁XXXoDoEoXXS₂XXXXXXX

where “S₁” represents a first spacer, “S₂” represents a second spacer, and “o” represents a phosphodiester bond. The bases “D” and “E” represent the range of bases that are linked through phosphodiester bonds. In this example, the range of bases is located four bases after the first spacer (e.g., D is positioned four bases after the first spacer) and the range of bases is located three bases preceding the second spacer (e.g., E is positioned three bases before the second spacer). In various embodiments, the positions of the two spacers differ than shown above and therefore, the range of bases linked through phosphodiester bonds are differently positioned. In various embodiments, all other bases of the STMN2 AON are linked through phosphorothioate bonds. Any nucleobase in the AON can be a nucleobase analog.

[0377] Table 10 below further depicts examples of STMN2 AON with a mix of phosphodiester and phosphorothioate linkages. In particular, Table 10 depicts examples of STMN2 AONs including spacers and a mix of phosphodiester and phosphorothioate linkages. Any nucleobase in the AON can be a nucleobase analog.

TABLE 10
Example STMN2 AONs with a mixture of phosphodiester and
phosphorothioate bonds.

| | AON Sequence* (5′ → 3′), where “o” | |
|---|---|---|
| SEQ | represents a phosphodiester bond, and | |
| ID | where “S” indicates a spacer. All other | Bases linked with |
| NO: | linkages are phosphorothioate bonds. | phosphodiester bonds |
| 173 | GAGTCCTGCAATATGAATATAATTT | N/A |
| 1451 | GAoGoSoCCTGCAATATSAATATAATTT | Bases at positions 3 and 4 |
| 1452 | GAoGoToCCTGCASTATGAATATSATTT | Bases at positions 3 and 4 |
| 1453 | GAoGoToCCSGCAATATGAATSTAATTT | Bases at positions 3 and 4 |
| 1454 | GAoGoToCCSGCAATATGAASATAATTT | Bases at positions 3 and 4 |
| 1455 | GToCoCoTGCSATATGAASATAAT | Bases at positions 3 and 4 |
| 1456 | GToCoCoTSCAATATGSATATAAT | Bases at positions 3 and 4 |
| 1457 | GToCoCoTGCSATATGSATATAAT | Bases at positions 3 and 4 |
| 1458 | GAGSCCTGCAAToAoToSAATATAATTT | 2 bases preceding a spacer |
| 1459 | GAGTCCTGCASTATGAAToAoToSATTT | 2 bases preceding a spacer |
| 1460 | GAGTCCSGCAATATGAoAoToSTAATTT | 2 bases preceding a spacer |
| 1461 | GAGTCCSGCAATATGoAoAoSATAATTT | 2 bases preceding a spacer |
| 1462 | GTCCTGCSATATGoAoAoSATAAT | 2 bases preceding a spacer |
| 1463 | GTCCTSCAATAoToGoSATATAAT | 2 bases preceding a spacer |
| 1464 | GTCCTGCSATAoToGoSATATAAT | 2 bases preceding a spacer |
| 1465 | GAoGoSoCoCTGCAATATSAATATAATTT | 1 base preceding and 1 base |
| | | after a spacer |
| 1466 | GAGTCCTGCoAoSoToATGAATATSATTT | 1 base preceding and 1 base |
| | | after a spacer |
| 1467 | GAGTCoCoSoGoCAATATGAATSTAATTT | 1 base preceding and 1 base |
| | | after a spacer |
| 1468 | GAGTCoCoSoGoCAATATGAASATAATTT | 1 base preceding and 1 base |
| | | after a spacer |
| 1469 | GTCCTGoCoSoAoTATGAASATAAT | 1 base preceding and 1 base |
| | | after a spacer |
| 1470 | GTCCoToSoCoAATATGSATATAAT | 1 base preceding and 1 base |
| | | after a spacer |
| 1471 | GTCCTGoCoSoAoTATGSATATAAT | 1 base preceding and 1 base |
| | | after a spacer |
| 1472 | GAGSCCTGCAATAoToSoAoATATAATTT | 1 base preceding and 1 base |
| | | after a spacer |
| 1473 | GAGTCCTGCASTATGAATAoToSoAoTTT | 1 base preceding and 1 base |
| | | after a spacer |
| 1474 | GAGTCCSGCAATATGAAoToSoToAATTT | 1 base preceding and 1 base |
| | | after a spacer |
| 1475 | GAGTCCSGCAATATGAoAoSoAoTAATTT | 1 base preceding and 1 base |
| | | after a spacer |
| 1476 | GTCCTGCSATATGAoAoSoAoTAAT | 1 base preceding and 1 base |
| | | after a spacer |
| 1477 | GTCCTSCAATAToGoSoAoTATAAT | 1 base preceding and 1 base |
| | | after a spacer |
| 1478 | GTCCTGCSATAToGoSoAoTATAAT | 1 base preceding and 1 base |
| | | after a spacer |
| 1479 | GAoGoSoCoCTGCAATAoToSoAoATATAATTT | 1 base preceding AND 1 |
| | | base after EACH spacer |
| 1480 | GAGTCCTGCoAoSoToATGAATAoToSoAoTTT | 1 base preceding AND 1 |
| | | base after EACH spacer |
| 1481 | GAGTCoCoSoGoCAATATGAAoToSoToAATTT | 1 base preceding AND 1 |
| | | base after EACH spacer |
| 1482 | GAGTCoCoSoGoCAATATGAoAoSoAoTAATTT | 1 base preceding AND 1 |
| | | base after EACH spacer |
| 1483 | GTCCTGoCoSoAoTATGAoAoSoAoTAAT | 1 base preceding AND 1 |
| | | base after EACH spacer |
| 1484 | GTCCoToSoCoAATAToGoSoAoTATAAT | 1 base preceding AND 1 |
| | | base after EACH spacer |
| 1485 | GTCCTGoCoSoAoTAToGoSoAoTATAAT | 1 base preceding AND 1 |
| | | base after EACH spacer |
| 197 | CCTTTCTCTCGAAGGTCTTCTGCCG | N/A |
| 1430 | CCTTTCTCTCGAAGGTCTTCTGC | N/A |
| 1431 | CTTTCTCTCGAAGGTCTTCTGCC | N/A |
| 1486 | CCoToToTCTCTCGAAGGTCTTCTGCCG | Bases at positions 3 and 4 |
| 1487 | CCoToToTCTCSCGAAGGTCTTCSGCCG | Bases at positions 3 and 4 |
| 1488 | CToToToCTCSCGAAGGTSTTCTGCC | Bases at positions 3 and 4 |
| 1489 | TToToCoTCTSGAAGGTCSTCTGCCG | Bases at positions 3 and 4 |
| 1490 | TToToCoTCTCGAAGGTCTTCTGCCG | Bases at positions 3 and 4 |
| 1491 | CCoToToTCTCTCGAAGGTCTTCTGC | Bases at positions 3 and 4 |
| 1492 | CCTTTCoToCoSCGAAGGTCTTCSGCCG | 2 bases preceding a spacer |
| 1493 | CTTTCoToCoSCGAAGGTSTTCTGCC | 2 bases preceding a spacer |
| 1494 | TTTCToCoToSGAAGGTCSTCTGCCG | 2 bases preceding a spacer |
| 1495 | CCTTTCTCSCGAAGGTCToToCoSGCCG | 2 bases preceding a spacer |
| 1496 | CTTTCTCSCGAAGoGoToSTTCTGCC | 2 bases preceding a spacer |
| 1497 | TTTCTCTSGAAGGoToCoSTCTGCCG | 2 bases preceding a spacer |
| 1498 | CCTTTCToCoSoCoGAAGGTCTTCSGCCG | 1 base preceding and 1 base |
| | | after a spacer |
| 1499 | CTTTCToCoSoCoGAAGGTSTTCTGCC | 1 base preceding and 1 base |
| | | after a spacer |
| 1500 | TTTCTCoToSoGoAAGGTCSTCTGCCG | 1 base preceding and 1 base |
| | | after a spacer |
| 1501 | CCTTTCTCSCGAAGGTCTToCoSoGoCCG | 1 base preceding and 1 base |
| | | after a spacer |
| 1502 | CTTTCTCSCGAAGGoToSoToTCTGCC | 1 base preceding and 1 base |
| | | after a spacer |
| 1503 | TTTCTCTSGAAGGToCoSoToCTGCCG | 1 base preceding and 1 base |
| | | after a spacer |
| 1504 | CCTTTCToCoSoCoGAAGGTCTToCoSoGoCCG | 1 base preceding AND 1 |
| | | base after EACH spacer |
| 1505 | CTTTCToCoSoCoGAAGGoToSoToTCTGCC | 1 base preceding AND 1 |
| | | base after EACH spacer |
| 1506 | TTTCTCoToSoGoAAGGToCoSoToCTGCCG | 1 base preceding AND 1 |
| | | base after EACH spacer |
| 1507 | CCTTTCTCSCGAAoGoGoToCoTTCSGCCG | Range of 4 bases between |
| | | two spacers |
| 1508 | CTTTCTCSCGAoAoGoGTSTTCTGCC | Range of 2 bases between |
| | | two spacers |
| 1509 | TTTCTCTSGAAoGoGoTCSTCTGCCG | Range of 2 bases between |
| | | two spacers |
| 1510 | GAoGSCCTGCAATATSAATATAATTT | Base 3 linked to preceding |
| | | base through phosphodiester |
| | | linkage |
| 1511 | GAGoTCCTGCASTATGAATATSATTT | Base 3 linked to preceding |
| | | base through phosphodiester |
| | | linkage |
| 1512 | GAGTCCoSGCAATATGAATSTAATTT | First spacer linked to |
| | | preceding base through |
| | | phosphodiester linkage |
| 1513 | GAGTCCSoGCAATATGAASATAATTT | First spacer linked to |
| | | succeeding base through |
| | | phosphodiester linkage |
| 1514 | GTCCTGCSoATATGAASATAAT | First spacer linked to |
| | | succeeding base through |
| | | phosphodiester linkage |
| 1515 | GTCCTGCoSATATGSATATAAT | First spacer linked to |
| | | preceding base through |
| | | phosphodiester linkage |
| 1516 | GTCCoToSCAATATGSATATAAT | 1 base preceding a first |
| | | spacer linked through |
| | | phosphodiester linkage |
| 1517 | GAGTCCSGCAATATGAAToSTAATTT | Second spacer linked to |
| | | preceding base through |
| | | phosphodiester linkage |
| 1518 | GAGTCCSGCAATATGAASoATAATTT | Second spacer linked to |
| | | succeeding base through |
| | | phosphodiester linkage |
| 1519 | GTCCTGCSATATGAAoSATAAT | Second spacer linked to |
| | | preceding base through |
| | | phosphodiester linkage |
| 1520 | GTCCTGCSATATGSoATATAAT | First spacer linked to |
| | | succeeding base through |
| | | phosphodiester linkage |
| 1521 | GTCCoTSCAATATGoSATATAAT | 1 base preceding a first |
| | | spacer linked through |
| | | phosphodiester linkage and |
| | | second spacer linked to |
| | | preceding base through |
| | | phosphodiester linkage |

[0378] In some embodiments, a disclosed STMN2 AON may have at least one modified nucleobase, e.g., 5-methylcytosine, and/or at least one methylphosphonate nucleotide, which is placed, for example, either at only one of the 5′ or 3′ ends or at both 5′ and 3′ ends or along the oligonucleotide sequence.

[0379] STMN2 AONs may include at least one modified sugar. For example, the sugar moiety of at least one nucleotide constituting the oligonucleotide is a ribose in which the 2′-OH group may be replaced by any one selected from the group consisting of OR, R, R′OR, SH, SR, NH₂, NR₂, N₃, CN, F, Cl, Br, and I (wherein R is an alkyl or aryl and R′ is an alkylene). Examples of a modified sugar moiety include a 2′-Ome modified sugar moiety, bicyclic sugar moiety, 2′-O-(2-methoxyethyl) (2′MOE or MOE), 2′-deoxy-2′-fluoro nucleoside, 2′-fluoro-β-D-arabinonucleoside, locked nucleic acid (LNA), constrained ethyl 2′-4′-bridged nucleic acid (cEt), S-cEt, tcDNA, hexitol nucleic acids (HNA), and tricyclic analog (e.g., tcDNA).

[0380] In some embodiments, STMN2 AONs comprise 2′Ome (e.g., a STMN2 AON comprising one or more 2′Ome modified sugar), 2′MOE or MOE (e.g., a STMN2 AON comprising one or more 2′MOE modified sugar), PNA (e.g., a STMN2 AON comprising one or more N-(2-aminoethyl)-glycine units linked by amide bonds or carbonyl methylene linkage as repeating units in place of a sugar-phosphate backbone), LNA (e.g., a STMN2 AON comprising one or more locked ribose, and can be a mixture of 2′-deoxy nucleotides or 2′Ome nucleotides), c-ET (e.g., a STMN2 AON comprising one or more cET sugar), cMOE (e.g., a STMN2 AON comprising one or more cMOE sugar), morpholino oligomer (e.g., a STMN2 AON comprising a backbone comprising one or more PMO), deoxy-2′-fluoro nucleoside (e.g., a STMN2 AON comprising one or more 2′-fluoro-β-D-arabinonucleoside), tcDNA (e.g., a STMN2 AON comprising one or more tcDNA modified sugar), ENA (e.g., a STMN2 AON comprising one or more ENA modified sugar), or HNA (e.g., a STMN2 AON comprising one or more HNA modified sugar). In some embodiments, a STMN2 AON comprises one or more phosphorothioate linkage, phosphodiester linkage, phosphotriester linkage, methylphosphonate linkage, phosphoramidate linkage, a phosphoramidothioate linkage, a thiophosphorodiamidate linkage, morpholino linkage, PNA linkage, or any combination of phosphorothioate linkage, phosphodiester linkage, a phosphotriester linkage, methylphosphonate linkage, phosphoramidate linkage, morpholino linkage, and PNA linkage. In some embodiments, a STMN2 AON comprises one or more phosphorothioate linkage, phosphodiester linkage, or a combination of phosphorothioate and phosphodiester linkages.

[0381] In some embodiments, STMN2 AONs with a sequence of any one of SEQ ID NOs: 1-466, SEQ ID NO: 893-1338, SEQ ID NOs: 1342-1366, and SEQ ID NOs: 1392-1664 is a chirally controlled oligonucleotide, such as a chirally controlled oligonucleotide described in any of U.S. Pat. Nos. 9,982,257, 10,590,413, 10,724,035, 10,450,568, and PCT Publication No. WO2019200185, each of which is hereby incorporated by reference in its entirety.

[0382] For example, a STMN2 AON with a sequence of any one of SEQ ID NOs: 1-466, SEQ ID NO: 893-1338, SEQ ID NOs: 1342-1366, and SEQ ID NOs: 1392-1664 is a chirally controlled oligonucleotide comprising a plurality of oligonucleotides of at least one type, wherein each type is defined by: 1) base sequence; 2) pattern of backbone linkages; 3) pattern of backbone chiral centers; and 4) pattern of backbone X-moieties (—X-L-R¹); wherein: the oligonucleotides of the at least one type comprise one or more phosphorothioate triester internucleotidic linkages and one or more phosphate diester linkage; the oligonucleotides of the at least one type comprise at least two consecutive modified internucleotidic linkages; and oligonucleotides of the at least one oligonucleotide type comprise one or more modified internucleotidic linkages independently having the structure of:

[chemical structure]

wherein: P* is an asymmetric phosphorus atom and is either Rp or Sp;
W is O, S or Se; each of X, Y and Z is independently —O—, —S—, —N(-L-R¹)—, or L; L is a covalent bond or an optionally substituted, linear or branched C₁-C₅₀ alkylene, wherein one or more methylene units of L are optionally and independently replaced by an optionally substituted C₁-C₆ alkylene, C₁-C₆ alkenylene, —C≡C—, —C(R′)₂—, -Cy-, —O—, —S—, —S—S—, —N(R′)—, —C(O)—, —C(S)—, —C(NR′)—, —C(O)N(R′)—, —N(R′)C(O)N(R′)—, —N(R′)C(O)—, —N(R′)C(O)O—, —OC(O)N(R′)—, —S(O)—, —S(O)₂—, —S(O)₂N(R′)—, —N(R′)S(O)₂—, —SC(O)—, —C(O)S—, —OC(O)—, or —C(O)O—; R¹ is halogen, R, or an optionally substituted C₁-C₁₀ aliphatic wherein one or more methylene units are optionally and independently replaced by an optionally substituted C₁-C₆ alkylene, C₁-C₆ alkenylene, —C≡C—, —C(R′)₂—, -Cy-, —O—, —S—, —S—S—, —N(R′)—, —C(O)—, —C(S)—, —C(NR′)—, —C(O)N(R′)—, —N(R′)C(O)N(R′)—, —N(R′)C(O)—, —N(R′)C(O)O—, —OC(O)N(R′)—, —S(O)—, —S(O)₂—, —S(O)₂N(R′)—, —N(R′)S(O)₂—, —SC(O)—, —C(O)S—, —OC(O)—, or —C(O)O—; each R′ is independently —R, —C(O)R, —CO₂R, or —SO₂R, or: two R′ on the same nitrogen are taken together with their intervening atoms to form an optionally substituted heterocyclic or heteroaryl ring, or two R′ on the same carbon are taken together with their intervening atoms to form an optionally substituted carbocyclic, heterocyclic, or heteroaryl ring; -Cy- is an optionally substituted bivalent ring selected from phenylene, carbocyclylene, arylene, heteroarylene, or heterocyclylene; each R is independently hydrogen, or an optionally substituted group selected from C₁-C₆ aliphatic, phenyl, carbocyclyl, aryl, heteroaryl, or heterocyclyl; and each

[chemical structure]

independently represents a connection to a nucleoside. In some embodiments, a STMN2 AON with a sequence of any one of SEQ ID NOs: 1-466, SEQ ID NO: 893-1338, SEQ ID NOs: 1342-1366, and SEQ ID NOs: 1392-1664 is a chirally controlled oligonucleotide comprising certain chemical modifications (e.g., 2′F (2′ Fluoro, which contains a fluorine molecule at the 2′ ribose position (instead of 2′-hydroxyl group in an RNA monomer)), 2′-Ome, phosphorothioate linkages, lipid conjugation, etc.), as described in U.S. Pat. No. 10,450,568.

### Motor Neuron Diseases

[0383] Motor neuron diseases are a group of diseases characterized by loss of function of motor neurons that coordinate voluntary movement of muscles by the brain. Motor neuron diseases may affect upper and/or lower motor neurons, and may have sporadic or familial origins. Motor neuron diseases include amyotrophic lateral sclerosis (ALS or Lou Gehrig's disease), progressive bulbar palsy, pseudobulbar palsy, progressive muscular atrophy, primary lateral sclerosis, spinal muscular atrophy, post-polio syndrome, and ALS with frontotemporal dementia.

[0384] Symptoms of motor neuron diseases include muscle decay or weakening, muscle pain, spasms, slurred speech, difficulty swallowing, loss of muscle control, joint pain, stiff limbs, difficulty breathing, drooling, and complete loss of muscle control, including over basic functions such as breathing, swallowing, eating, speaking, and limb movement. These symptoms are also sometimes accompanied by depression, loss of memory, difficulty with planning, language deficits, altered behavior, and difficulty assessing spatial relationships and/or changes in personality.

[0385] Motor neuron diseases can be assessed and diagnosed by a clinician of skill, for example, a neurologist, using various tools and tests. For example, the presence or risk of developing a motor neuron disease can be assessed or diagnosed using blood and urine tests (for example, tests that assay for the presence of creatinine kinase), magnetic resonance imaging (MRI), electromyography (EMG), nerve conduction study (NCS), spinal tap, lumbar puncture, and/or muscle biopsy. Motor neuron diseases can be diagnosed with the aid of a physical exam and/or a neurological exam to assess motor and sensory skills, nerve function, hearing and speech, vision, coordination and balance, mental status, and changes in mood or behavior.

### Amyotrophic Lateral Sclerosis

[0386] ALS is a progressive motor neuron disease that disrupts signals to all voluntary muscles. ALS results in atrophy of both upper and lower motor neurons. Symptoms of ALS include weakening and wasting of the bulbar muscles, general and bilateral loss of strength, spasticity, muscle spasms, muscle cramps, fasciculations, slurred speech, and difficulty breathing or loss of ability to breathe. Some individuals with ALS also suffer from cognitive decline. At the molecular level, ALS is characterized by protein and RNA aggregates in the cytoplasm of motor neurons, including aggregates of the RNA-binding protein TDP43.

[0387] ALS is most common in males above 40 years of age, although it can also occur in women and children. Risk of ALS is also heightened in individuals who smoke, are exposed to chemicals such as lead, or who have served in the military. Most instances of ALS are sporadic, while only about 10% of cases are familial. Causes of ALS include sporadic or inherited genetic mutations, high levels of glutamate, protein mishandling. Genetic mutations associated with ALS include mutations in the genes SOD1, C9orf72, TARDBP, FUS, ANG, ATXN2, CHCHD10, CHMP2B, DCTN1, ErbB4, FIG4, HNRPA1, MATR3, NEFH, OPTN, PFN1, PRPH, SETX, SIGMAR1, SMN1, SPG11, SQSTM1, TBK1, TRPM7, TUBA4A, UBQLN2, VAPB, and VCP.

### Frontotemporal Dementia

[0388] Frontotemporal dementia (FTD) is a form of dementia that affects the frontal and temporal lobes of the brain. FTD includes frontotemporal lobar degeneration (FTLD). It has an earlier average age of onset than Alzheimer's disease—40 years of age. Symptoms of FTD include extreme changes in behavior and personality, speech and language problems, and movement-related symptoms such as tremor, rigidity, muscle spasm, weakness, and difficulty swallowing. Subtypes of FTD include behavior variant frontotemporal dementia (bvFTD), characterized by changes in personality and behavior, and primary progressive aphasia (PPA), which affects language skills, speaking, writing and comprehension. FTD is associated with tau protein accumulation (Pick bodies) and altered TDP43 function. About 30% of cases of FTD are familial, and no other risk factors other than family history of the disease are known. Genetic mutations associated with FTD include mutations in the genes C9orf72, Progranulin (GRN), microtubule-associated protein tau (MAPT), UBQLN2, VPC, CHMP2B, TARDBP, FUS, ITM2B, CHCHD10, SQSTM1, PSEN1, PSEN2, CTSF, CYP27A1, TBK1 and TBP.

Amyotrophic Lateral Sclerosis with Frontotemporal Dementia

[0389] Amyotrophic lateral sclerosis with frontotemporal dementia (ALS with FTD) is a clinical syndrome in which FTD and ALS occur in the same individual. Interestingly, mutations in C₉orf72 are the most common cause of familial forms of ALS and FTD. Additionally, mutations in TBK1, VCP, SQSTM1, UBQLN2 and CHMP2B are also associated with ALS with FTD. Symptoms of ALS with FTD include dramatic changes in personality, as well as muscle weakness, muscle atrophy, fasciculations, spasticity, dysarthria, dysphagia, and degeneration of the spinal cord, motor neurons, and frontal and temporal lobes of the brain. At the molecular level, ALS with FTD is characterized by the accumulation of TDP-43 and/or FUS proteins. TBK1 mutations are associated with ALS, FTD, and ALS with FTD.

### Limbic-Predominant Age-Related TDP-43 Encephalopathy (LATE)

[0390] Limbic-predominant age-related TDP-43 encephalopathy (LATE) is characterized by accumulation of misfolded TDP-43 protein in the brain, specifically in the limbic system. LATE is a neurological disorder that typically manifests in older patients (e.g., greater than 80 years old). LATE can be a diagnosis for dementia and LATE often mimics the symptoms of Alzheimer's Disease including memory loss, confusion, and mood changes.

### Methods of Treatment

[0391] Further (for example, amyotrophic lateral sclerosis (ALS), frontotemporal dementia (FTD), Alzheimer's disease (AD), Parkinson's disease (PD), Huntington's disease, progressive supranuclear palsy (PSP), brain trauma, spinal cord injury, corticobasal degeneration (CBD), and Limbic-predominant age-related TDP-43 encephalopathy (LATE) in a patient in need thereof comprising administering a STMN2 AON. In some embodiments, provided herein are methods for treatment of a neurological disease in a patient in need thereof, comprising administering a disclosed STMN2 AON. In some embodiments of the disclosure, an effective amount of a disclosed STMN2 oligonucleotide may be administered to a patient in need thereof to treat a neurological disease, and/or to increase, restore, or stabilize expression of STMN2 mRNA that is capable of translation to produce a functional STMN2 protein, thereby increase, restore, or stabilize STMN2 activity and/or function.

[0392] In some embodiments, treating a neurological disease comprises at least ameliorating or reducing one symptom associated with the neurological disease (for example, reducing muscle weakness in a patient with ALS). Methods of treating a neurological disease (for example, ALS, FTD, or ALS with FTD) in a patient suffering therefrom are provided, that include administering a disclosed STMN2 AON. In some embodiments, methods of slowing the progression of a neurological disease, for example, a motor neuron disease, are provided.

[0393] Provided herein are methods of treating, reducing the risk of developing, or delaying the onset of a neurological disease in a subject in need thereof comprising administering a disclosed STMN2 AON. The methods include for example, treating a subject at risk of developing a neurological disease; e.g., administering to the subject an effective amount of a disclosed STMN2 AON. Neurological diseases that can be treated in this manner include motor neuron diseases, ALS, FTD, ALS with FTD, progressive bulbar palsy, pseudobulbar palsy, progressive muscular atrophy, primary lateral sclerosis, spinal muscular atrophy, and post-polio syndrome.

[0394] Methods of preventing or treating neurological diseases (for example, PD, ALS, FTD, and ALS with FTD) form part of this disclosure. Such methods may comprise administering to a patient in need thereof or a patient at risk, a pharmaceutical preparation comprising a STMN2 AON disclosed herein. For example, a method of preventing or treating a neurological disease is provided comprising administering to a patient in need thereof a STMN2 AON disclosed herein.

[0395] Patients treated using an above method may experience an increase, restoration of, or stabilization of STMN2 mRNA expression, which is capable of translation to produce a functional STMN2 protein, of at least about 5%, 10%, 20%, 30%, 40% or even 50%, thereby increase, restore, or stabilize STMN2 activity and/or function in a target cell (for example, a motor neuron) after administering a STMN2 oligonucleotide e.g. after 1 day, 2 days, 1 week, 2 weeks, 3 weeks, 4 weeks, 5 weeks, 6 weeks, 7 weeks, 8 weeks, 1 month, 2 months, 3, months, 4 months, 5, months, or 6 months or more. In some embodiments, administering such a STMN2 oligonucleotide may be on, e.g., at least a daily basis. The STMN2 oligonucleotide may be administered orally. In some embodiments, the STMN2 oligonucleotide is administered intrathecally, intrathalamically, or intracisternally. For example, in an embodiment described herein, a STMN2 oligonucleotide is administered intrathecally, intrathalamically or intracisternally about every 3 months. The delay or amelioration of clinical manifestation of a neurological disease in a patient as a consequence of administering a STMN2 oligonucleotide disclosed here may be at least e.g., 6 months, 1 year, 18 months or even 2 years or more as compared to a patient who is not administered a STMN2 oligonucleotide, such as one disclosed herein.

[0396] STMN2 oligonucleotides can be used alone or in combination with each other whereby at least two STMN2 oligonucleotides are used together in a single composition or as part of a treatment regimen. STMN2 oligonucleotides may also be used in combination with other drugs or AON for treating neurological diseases or conditions.

[0397] In various embodiments, disclosed herein is a method for treating amyotrophic lateral sclerosis (ALS) in a subject in need thereof, the method comprising administering to the subject an oligonucleotide comprising a segment with at most 7 linked nucleosides, and wherein oligonucleotide shares at least 85% identity with any one of SEQ ID NOs: 1-466, SEQ ID NO: 893-1338, SEQ ID NOs: 1342-1366, and SEQ ID NOs: 1392-1664, or a pharmaceutically acceptable salt thereof; wherein at least one (i.e., one or more) nucleoside linkage of the oligonucleotide is independently selected from the group consisting of: a phosphodiester linkage, a phosphorothioate linkage, an alkyl phosphate linkage, a phosphorodithioate linkage, a phosphotriester linkage, an alkylphosphonate linkage, a 3-methoxypropyl phosphonate linkage, a methylphosphonate linkage, an aminoalkylphosphotriester linkage, an alkylene phosphonate linkage, a phosphinate linkage, a phosphoramidate linkage, a phosphoramidothioate linkage, a thiophosphorodiamidate linkage, a phosphorodiamidate linkage, an aminoalkylphosphoramidate linkage, a thiophosphoramidate linkage, a thionoalkylphosphonate linkage, a thionoalkylphosphotriester linkage, a thiophosphate linkage, a selenophosphate linkage, and a boranophosphate linkage, and/or wherein at least one (i.e., one or more) nucleoside is substituted with a component selected from the group consisting of a 2′-O-(2-methoxyethyl) nucleoside, a 2′-O-methyl nucleoside, a 2′-deoxy-2′-fluoro nucleoside, a 2′-fluoro-β-D-arabinonucleoside, a locked nucleic acid (LNA), a tricyclic nucleic acid, constrained methoxyethyl (cMOE), constrained ethyl (cET), and a peptide nucleic acid (PNA), optionally wherein the oligonucleotide further comprises a spacer.

[0398] In various embodiments, disclosed herein is a method for treating frontotemporal dementia (FTD) in a subject in need thereof, the method comprising administering to the subject an oligonucleotide comprising a segment with at most 7 linked nucleosides, and wherein oligonucleotide shares at least 85% identity with any one of SEQ ID NOs: 1-466, SEQ ID NO: 893-1338, SEQ ID NOs: 1342-1366, and SEQ ID NOs: 1392-1664, or a pharmaceutically acceptable salt thereof; wherein at least one (i.e., one or more) nucleoside linkage of the oligonucleotide is independently selected from the group consisting of: a phosphodiester linkage, a phosphorothioate linkage, an alkyl phosphate linkage, a phosphorodithioate linkage, a phosphotriester linkage, an alkylphosphonate linkage, a 3-methoxypropyl phosphonate linkage, a methylphosphonate linkage, an aminoalkylphosphotriester linkage, an alkylene phosphonate linkage, a phosphinate linkage, a phosphoramidate linkage, a phosphoramidothioate linkage, a thiophosphorodiamidate linkage, a phosphorodiamidate linkage, an aminoalkylphosphoramidate linkage, a thiophosphoramidate linkage, a thionoalkylphosphonate linkage, a thionoalkylphosphotriester linkage, a thiophosphate linkage, a selenophosphate linkage, and a boranophosphate linkage, and/or wherein at least one (i.e., one or more) nucleoside is substituted with a component selected from the group consisting of a 2′-O-(2-methoxyethyl) nucleoside, a 2′-O-methyl nucleoside, a 2′-deoxy-2′-fluoro nucleoside, a 2′-fluoro-β-D-arabinonucleoside, a locked nucleic acid (LNA), a tricyclic nucleic acid, constrained methoxyethyl (cMOE), constrained ethyl (cET), and a peptide nucleic acid (PNA), optionally wherein the oligonucleotide further comprises a spacer.

[0399] In various embodiments, disclosed herein is a method for treating amyotrophic lateral sclerosis (ALS) with frontotemporal dementia (FTD) in a subject in need thereof, the method comprising administering to the subject an oligonucleotide comprising a segment with at most 7 linked nucleosides, and wherein oligonucleotide shares at least 85% identity with any one of SEQ ID NOs: 1-466, SEQ ID NO: 893-1338, SEQ ID NOs: 1342-1366, and SEQ ID NOs: 1392-1664, or a pharmaceutically acceptable salt thereof; wherein at least one (i.e., one or more) nucleoside linkage of the oligonucleotide is independently selected from the group consisting of: a phosphodiester linkage, a phosphorothioate linkage, an alkyl phosphate linkage, a phosphorodithioate linkage, a phosphotriester linkage, an alkylphosphonate linkage, a 3-methoxypropyl phosphonate linkage, a methylphosphonate linkage, an aminoalkylphosphotriester linkage, an alkylene phosphonate linkage, a phosphinate linkage, a phosphoramidate linkage, a phosphoramidothioate linkage, a thiophosphorodiamidate linkage, a phosphorodiamidate linkage, an aminoalkylphosphoramidate linkage, a thiophosphoramidate linkage, a thionoalkylphosphonate linkage, a thionoalkylphosphotriester linkage, a thiophosphate linkage, a selenophosphate linkage, and a boranophosphate linkage, and/or wherein at least one (i.e., one or more) nucleoside is substituted with a component selected from the group consisting of a 2′-O-(2-methoxyethyl) nucleoside, a 2′-O-methyl nucleoside, a 2′-deoxy-2′-fluoro nucleoside, a 2′-fluoro-β-D-arabinonucleoside, a locked nucleic acid (LNA), a tricyclic nucleic acid, constrained methoxyethyl (cMOE), constrained ethyl (cET), and a peptide nucleic acid (PNA), optionally wherein the oligonucleotide further comprises a spacer.

### Treatment and Evaluation

[0400] A patient, as described herein, refers to any animal at risk for, suffering from or diagnosed with a neurological disease, including, but not limited to, mammals, primates, and humans. In certain embodiments, the patient may be a non-human mammal such as, for example, a cat, a dog, or a horse. A patient may be an individual diagnosed with a high risk of developing a neurological disease, someone who has been diagnosed with a neurological disease, someone who previously suffered from a neurological disease, or an individual evaluated for symptoms or indications of a neurological disease, for example, any of the signs or symptoms associated with neurological diseases such as: amyotrophic lateral sclerosis (ALS), frontotemporal dementia (FTD), ALS with FTD, Alzheimer's disease (AD), Parkinson's disease (PD), Huntington's disease, progressive supranuclear palsy (PSP), brain trauma, spinal cord injury, corticobasal degeneration (CBD), nerve injuries (e.g., brachial plexus injuries), neuropathies (e.g., chemotherapy induced neuropathy), and TDP43 proteinopathies (e.g., chronic traumatic encephalopathy, Perry Syndrome, Dementia with Lewy body in association with Alzheimer's disease, Parkinson's disease with or without dementia, and Limbic-predominant age-related TDP-43 encephalopathy (LATE)).

[0401] “A patient in need,” as used herein, refers to a patient suffering from any of the symptoms or manifestations of a neurological disease, a patient who may suffer from any of the symptoms or manifestations of a neurological disease, or any patient who might benefit from a method of the disclosure for treating a neurological disease. A patient in need may include a patient who is diagnosed with a risk of developing a neurological disease, a patient who has suffered from a neurological disease in the past, or a patient who has previously been treated for a neurological disease.

[0402] “Effective amount,” as used herein, refers to the amount of an agent that is sufficient to at least partially treat a condition when administered to a patient. The therapeutically effective amount will vary depending on the severity of the condition, the route of administration of the component, and the age, weight, etc. of the patient being treated. Accordingly, an effective amount of a disclosed STMN2 oligonucleotide is the amount of the STMN2 oligonucleotide necessary to treat a neurological disease in a patient such that administration of the agent prevents a neurological disease from occurring in a subject, prevents neurological disease progression (e.g., prevents the onset or increased severity of symptoms of the neurological such as muscle weakening, spasms, or fasciculation), or relieves or completely ameliorates all associated symptoms of a neurological disease, i.e. causes regression of the disease.

[0403] Efficacy of treatment may be evaluated by means of evaluation of gross symptoms associated with a neurological disease, analysis of tissue histology, biochemical assay, imaging methods such as, for example, magnetic resonance imaging, or other known methods. For instance, efficacy of treatment may be evaluated by analyzing gross symptoms of the disease such as changes in muscle strength and control or other aspects of gross pathology associated with a neurological disease following administration, to a patient suffering from a neurological disease, a disclosed STMN2 oligonucleotide.

[0404] Efficacy of treatment may also be evaluated at the tissue or cellular level, for example, by means of obtaining a tissue biopsy (e.g., a brain, spinal, muscle, motor neuron tissue biopsy, or olfactory neurosphere cell biopsy) and evaluating gross tissue or cell morphology or staining properties. Biochemical assays that examine protein or RNA expression may also be used to evaluate efficacy of treatment. For instance, one may evaluate levels of a protein or gene product indicative of a neurological disease, in dissociated cells or non-dissociated tissue via immunocytochemical, immunohistochemical, Western blotting, or Northern blotting methods, or methods useful for evaluating RNA levels such as quantitative or semi-quantitative polymerase chain (e.g., digital PCR (DigitalPCR, dPCR, or dePCR), qPCR etc.) reaction. One may also evaluate the presence or level of expression of useful biomarkers (e.g., neurofilament light (NEFL), neurofilament heavy (NEFH), TDP-43 or p75 extracellular domain (p75^{ECD})) found in spinal cord fluid, cerebrospinal fluid, extracellular vesicles (for example, exosome-like cerebrospinal fluid extracellular vesicles (“CSF exosomes”), such as those described in Welton et al., (2017) “Cerebrospinal fluid extracellular vesicle enrichment for protein biomarker discovery in neurological disease; multiple sclerosis” J Extracell Vesicles., 6(1):1-10; and Street et al., (2012) “Identification and proteomic profiling of exosomes in human cerebrospinal fluid” J Transl. Med., 10:5), urine, fecal matter, lymphatic fluid, blood, plasma, or serum to evaluate disease state and efficacy of treatment. One may also evaluate the presence or level of expression of useful biomarkers found in the plasma, neuronal extracellular vesicles/exosomes. Additional measurements of efficacy may include strength duration time constant (SDTC), short interval cortical inhibition (SICI), dynamometry, accurate test of limb isometric strength (ATLIS), compound muscle action potential (CMAP), and ALSFRS-R. In certain embodiments, urinary neurotrophin receptor p75 extracellular domain (p75^{ECD}) is a disease progression and prognostic biomarker in amyotrophic lateral sclerosis (ALS). Phosphorylated neurofilament heavy chain (pNFH) in cerebrospinal fluid (CSF) predict disease status and survival in C9ORF72-associated amyotrophic lateral sclerosis (c9ALS) patients. CSF pNFH as a prognostic biomarker for clinical trials, which will increase the likelihood of successfully developing a treatment for c9ALS.

[0405] In evaluating efficacy of treatment, suitable controls may be chosen to ensure a valid assessment. For instance, one can compare symptoms evaluated in a patient with a neurological disease following administration of a disclosed STMN2 oligonucleotide to those symptoms in the same patient prior to treatment or at an earlier point in the course of treatment or in another patient not diagnosed with the neurological disease. Alternatively, one may compare the results of biochemical or histological analysis of tissue following administration of a disclosed STMN2 oligonucleotide with those of tissue from the same patient or from an individual not diagnosed with the neurological disease or from the same patient prior to administration of the STMN2 oligonucleotide. Additionally, one may compare blood, plasma, serum, cell, urine, lymphatic fluid, spinal cord fluid, cerebrospinal fluid, or fecal samples following administration of the STMN2 oligonucleotide with comparable samples from an individual not diagnosed with the neurological disease or from the same patient prior to administration of the STMN2 oligonucleotide. In some embodiments one may compare extracellular vesicles (for example CSF exosomes), following administration of the STMN2 oligonucleotide with extracellular vesicles from an individual not diagnosed with the neurological disease or from the same patient prior to administration of the STMN2 oligonucleotide.

[0406] Validation of STMN2 oligonucleotides may be determined by direct or indirect assessment of STMN2 expression levels or activity. For instance, biochemical assays that measure STMN2 protein or RNA expression may be used to evaluate overall effect on STMN2 transcripts (for example, a STMN2 pre-mRNA comprising a cryptic exon) comprising a sequence that shares at least 90% (e.g., 90%, 91%, 92%, 93%, 94%, 95%, 96%, 97%, 98%, 99%, or 100%) identity to SEQ ID NO: 1339 or SEQ ID NO: 1341. For instance, one may measure STMN2 protein levels in cells or tissue by Western blot to evaluate overall STMN2 levels. One may also measure STMN2 mRNA levels by means of Northern blot or quantitative polymerase chain reaction to determine overall effect on STMN2 transcripts (for example, a STMN2 pre-mRNA comprising a cryptic exon) comprising a sequence that shares at least 90% (e.g., 90%, 91%, 92%, 93%, 94%, 95%, 96%, 97%, 98%, 99%, or 100%) identity to SEQ ID NO: 1339 or SEQ ID NO: 1341. One may also evaluate STMN2 protein levels or levels of another protein indicative of STMN2 signaling activity in dissociated cells, non-dissociated tissue, extracellular vesicles (for example, CSF exosomes), blood, serum, or fecal matter via immunocytochemical or immunohistochemical methods.

[0407] Modulation of expression levels of STMN2 transcripts (for example, a STMN2 pre-mRNA comprising a cryptic exon) comprising a sequence that shares at least 90% (e.g., 90%, 91%, 92%, 93%, 94%, 95%, 96%, 97%, 98%, 99%, or 100%) identity to SEQ ID NO: 1339 or SEQ ID NO: 1341 may also be evaluated indirectly by measuring parameters such as autophagy, endocytosis, protein aggregation, and the presence or level of expression of useful biomarkers (e.g., neurofilament light (NEFL), neurofilament heavy (NEFH), TDP-43, or p75^{ECD} found in plasma, spinal cord fluid, cerebrospinal fluid, extracellular vesicles (for example, CSF exosomes), blood, urine, lymphatic fluid, fecal matter, or tissue to evaluate the modulation of expression of STMN2 transcripts (for example, a STMN2 pre-mRNA comprising a cryptic exon) comprising a sequence that shares at least 90% (e.g., 90%, 91%, 92%, 93%, 94%, 95%, 96%, 97%, 98%, 99%, or 100%) identity to SEQ ID NO: 1339 or SEQ ID NO: 1341. Modulation of expression levels of STMN2 transcripts (for example, a STMN2 pre-mRNA comprising a cryptic exon) comprising a sequence that shares at least 90% (e.g., 90%, 91%, 92%, 93%, 94%, 95%, 96%, 97%, 98%, 99%, or 100%) identity to SEQ ID NO: 1339 or SEQ ID NO: 1341 may also be evaluated indirectly by measuring parameters such as autophagy, endocytosis, protein aggregation, and the presence or level of expression of physiological biomarkers such as compound muscle action potential (CMAP). Additional measurements may include strength duration time constant (SDTC), short interval cortical inhibition (SICI), 157yrrolidiny, accurate test of limb isometric strength (ATLIS), compound muscle action potential, and ALSFRS-R. In certain embodiments, urinary neurotrophin receptor p75 extracellular domain (p75^{ECD}) is a disease progression and prognostic biomarker in amyotrophic lateral sclerosis (ALS). Phosphorylated neurofilament heavy chain (pNFH) in cerebrospinal fluid (CSF) predict disease status and survival in c9ALS patients. CSF pNFH as a prognostic biomarker for clinical trials, which will increase the likelihood of successfully developing a treatment for c9ALS.

[0408] The disclosure also provides methods of restoring expression of full length STMN2 transcripts in cells of a patient suffering from a neurological disease. Full length STMN2 transcripts may be restored in any cell in which STMN2 expression or activity occurs, including cells of the nervous system (including the central nervous system (e.g., spinal cord or brain), the peripheral nervous system, motor neurons, glial cells, astrocytes, oligodendrocytes, microglia, the brain, the brain stem, the frontal lobes, the temporal lobes, the spinal cord), the musculoskeletal system, spinal fluid, and cerebrospinal fluid. Cells of the musculoskeletal system include skeletal muscle cells (e.g., myocytes). Motor neurons include upper motor neurons and lower motor neurons.

### Pharmaceutical Compositions and Routes of Administration

[0409] The present disclosure also provides methods for treating a neurological disease via administration of a pharmaceutical composition comprising a disclosed STMN2 oligonucleotide. In another aspect, the disclosure provides a pharmaceutical composition for use in treating a neurological disease. The pharmaceutical composition may be comprised of a disclosed STMN2 oligonucleotide, and a pharmaceutically acceptable carrier. As used herein the term “pharmaceutical composition” means, for example, a mixture containing a specified amount of a therapeutic compound, e.g., a therapeutically effective amount, of a therapeutic compound in a pharmaceutically acceptable carrier to be administered to a mammal, e.g., a human, in order to treat a neurological disease. In some embodiments, described herein are pharmaceutical compositions comprising a disclosed STMN2 oligonucleotide, and a pharmaceutically acceptable carrier. In another aspect, the disclosure provides use of a disclosed STMN2 oligonucleotide in the manufacture of a medicament for treating a neurological disease. “Medicament,” as used herein, has essentially the same meaning as the term “pharmaceutical composition.”

[0410] As used herein, “pharmaceutically acceptable carrier” means buffers, carriers, and excipients suitable for use in contact with the tissues of human beings and animals without excessive toxicity, irritation, allergic response, or other problem or complication, commensurate with a reasonable benefit/risk ratio. The carrier(s) should be “acceptable” in the sense of being compatible with the other ingredients of the formulations and not deleterious to the recipient. Pharmaceutically acceptable carriers include buffers, solvents, dispersion media, coatings, isotonic and absorption delaying agents, and the like, that are compatible with pharmaceutical administration. The use of such media and agents for pharmaceutically active substances is known in the art. In one embodiment the pharmaceutical composition is administered orally and includes an enteric coating suitable for regulating the site of absorption of the encapsulated substances within the digestive system or gut. For example, an enteric coating can include an ethylacrylate-methacrylic acid copolymer.

[0411] In one embodiment, a disclosed STMN2 oligonucleotide and any pharmaceutical composition thereof may be administered by one or several routes, including topically, intrathecally, intrathalamically, intracisternally, parenterally, orally, rectally, buccally, sublingually, vaginally, pulmonarily, intratracheally, intranasally, transdermally, or intraduodenally. The term parenteral as used herein includes subcutaneous injections, intrapancreatic administration, intravenous, intracisternal, intracerebroventricular, intrathecal, intrathalamic, intramuscular, intraperitoneal, intrasternal injection or infusion techniques. For example, a disclosed STMN2 oligonucleotide may be administered subcutaneously to a subject. In another example, a disclosed STMN2 oligonucleotide may be administered orally to a subject. In another example, a disclosed STMN2 oligonucleotide may be administered directly to the nervous system, or specific regions or cells of the nervous system (e.g., the brain, brain stem, lower motor neurons, spinal cord, upper motor neurons) via parenteral administration, for example, a disclosed STMN2 oligonucleotide may be administered intrathecally, intrathalamically or intracisternally.

[0412] In various embodiments, a STMN2 oligonucleotide, for example a STMN2 AON, can be exposed to calcium-containing buffers prior to administration. Such calcium-containing buffers can mitigate toxicity adverse effects of the STMN2 oligonucleotide. Further details of exposing an example antisense oligonucleotide to calcium-containing buffers is described in Moazami, et al., Quantifying and Mitigating Motor Phenotypes Induced by Antisense Oligonucleotides in the Central Nervous System, bioRxiv 2021.02.14.431096, which is hereby incorporated by reference in its entirety.

[0413] In some embodiments, a STMN2 oligonucleotide, for example a STMN2 AON, can be encapsulated in a nanoparticle coating. It is believed that nanoparticle encapsulation prevents AON degradation and enhances cellular uptake. For example, in some embodiments a STMN2 oligonucleotide is encapsulated in a coating of a cationic polymer, for example, a synthetic polymer (e.g., poly-L-lysine, polyamidoamine, a poly((3-amino ester), and polyethyleneimine) or a naturally occurring polymer (e.g., chitosan and a protamine). In some embodiments, a STMN2 oligonucleotide is encapsulated in a lipid or lipid-like material, for example, a cationic lipid, a cationic lipid-like material, or an ionizable lipid that is positively charged only at an acidic pH. For example, in some embodiments, a STMN2 oligonucleotide is encapsulated in a lipid nanoparticle that includes hydrophobic moieties, e.g., cholesterol and/or a polyethylene glycol (PEG) lipid

[0414] Pharmaceutical compositions containing a disclosed STMN2 oligonucleotide, such as those disclosed herein, can be presented in a dosage unit form and can be prepared by any suitable method. A pharmaceutical composition should be formulated to be compatible with its intended route of administration. Useful formulations can be prepared by methods well known in the pharmaceutical art. For example, see Remington's Pharmaceutical Sciences, 18^{th} ed. (Mack Publishing Company, 1990).

[0415] Pharmaceutical formulations, in some embodiments, are sterile. Sterilization can be accomplished, for example, by filtration through sterile filtration membranes. Where the composition is lyophilized, filter sterilization can be conducted prior to or following lyophilization and reconstitution.

### Parenteral Administration

[0416] The pharmaceutical compositions of the disclosure can be formulated for parenteral administration, e.g., formulated for injection via the intravenous, intracisternal, intracerebroventricular, intramuscular, subcutaneous, intrathecal, intrathalamic, intralesional, or intraperitoneal routes. The preparation of an aqueous composition, such as an aqueous pharmaceutical composition containing a disclosed STMN2 oligonucleotide, will be known to those of skill in the art in light of the present disclosure. Typically, such compositions can be prepared as injectables, either as liquid solutions or suspensions; solid forms suitable for using to prepare solutions or suspensions upon the addition of a liquid prior to injection can also be prepared; and the preparations can also be emulsified.

[0417] The pharmaceutical forms suitable for injectable use include sterile aqueous solutions or dispersions; formulations including normal saline, artificial cerebrospinal fluid, sesame oil, peanut oil or aqueous propylene glycol; and sterile powders for the extemporaneous preparation of sterile injectable solutions or dispersions. In all cases the form must be sterile and must be fluid to the extent that easy syringability exists. It must be stable under the conditions of manufacture and storage and must be preserved against the contaminating action of microorganisms, such as bacteria and fungi.

[0418] Solutions of active compounds as free base or pharmacologically acceptable salts can be prepared in water suitably mixed with a surfactant, such as hydroxypropylcellulose. Dispersions can also be prepared in glycerol, liquid polyethylene glycols, and mixtures thereof and in oils. In addition, sterile, fixed oils may be employed as a solvent or suspending medium. For this purpose any bland fixed oil can be employed including synthetic mono- or diglycerides. In addition, fatty acids such as oleic acid can be used in the preparation of injectables. The sterile injectable preparation may also be a sterile injectable solution, suspension, or emulsion in a nontoxic parenterally acceptable diluent or solvent, for example, as a solution in 1,3-butanediol. Among the acceptable vehicles and solvents that may be employed are water, Ringer's solution, U.S.P., and isotonic sodium chloride solution. In one embodiment, a disclosed STMN2 antisense oligonucleotide may be suspended in a carrier fluid comprising 1% (w/v) sodium carboxymethylcellulose and 0.1% (v/v) TWEEN™ 80. Under ordinary conditions of storage and use, these preparations contain a preservative to prevent the growth of microorganisms.

[0419] Injectable preparations, for example, sterile injectable aqueous or oleaginous suspensions may be formulated according to the known art using suitable dispersing or wetting agents and suspending agents. Generally, dispersions are prepared by incorporating the various sterilized active ingredients into a sterile vehicle which contains the basic dispersion medium and the required other ingredients from those enumerated above. Sterile injectable solutions of the disclosure may be prepared by incorporating a disclosed STMN2 antisense oligonucleotide in the required amount of the appropriate solvent with various of the other ingredients enumerated above, as required, followed by filtered sterilization. In the case of sterile powders for the preparation of sterile injectable solutions, the preferred methods of preparation are vacuum-drying and freeze-drying techniques which yield a powder of the active ingredient plus any additional desired ingredient from a previously sterile-filtered solution thereof. The injectable formulations can be sterilized, for example, by filtration through a bacteria-retaining filter.

[0420] The preparation of more, or highly concentrated solutions for intramuscular injection is also contemplated. In this regard, the use of DMSO as solvent is preferred as this will result in extremely rapid penetration, delivering high concentrations of the disclosed oligonucleotide to a small area.

[0421] Suitable preservatives for use in such a solution include benzalkonium chloride, benzethonium chloride, chlorobutanol, thimerosal and the like. Suitable buffers include boric acid, sodium and potassium bicarbonate, sodium and potassium borates, sodium and potassium carbonate, sodium acetate, sodium biphosphate and the like, in amounts sufficient to maintain the pH at between about pH 6 and pH 8, and for example, between about pH 7 and pH 7.5. Suitable tonicity agents are dextran 40, dextran 70, dextrose, glycerin, potassium chloride, propylene glycol, sodium chloride, and the like, such that the sodium chloride equivalent of the solution is in the range 0.9 plus or minus 0.2%. Suitable antioxidants and stabilizers include sodium bisulfite, sodium metabisulfite, sodium 161yrrolidiny, thiourea and the like. Suitable wetting and clarifying agents include polysorbate 80, polysorbate 20, poloxamer 282 and tyloxapol. Suitable viscosity-increasing agents include dextran 40, dextran 70, gelatin, glycerin, hydroxyethylcellulose, hydroxymethylpropylcellulose, lanolin, methylcellulose, petrolatum, polyethylene glycol, polyvinyl alcohol, polyvinylpyrrolidone, carboxymethylcellulose and the like.

### Oral Administration

[0422] In some embodiments, contemplated herein are compositions suitable for oral delivery of a disclosed STMN2 oligonucleotide, e.g., tablets that include an enteric coating, e.g., a gastro-resistant coating, such that the compositions may deliver a STMN2 oligonucleotide to, e.g., the gastrointestinal tract of a patient.

[0423] For example, a tablet for oral administration is provided that comprises granules (e.g., is at least partially formed from granules) that include a disclosed STMN2 oligonucleotide, e.g., a STMN2 oligonucleotide represented by any SEQ ID NOs: 1-466, SEQ ID NO: 893-1338, SEQ ID NOs: 1342-1366, and SEQ ID NOs: 1392-1664 that targets a STMN2 transcript comprising a sequence that shares at least 90% (e.g., 90%, 91%, 92%, 93%, 94%, 95%, 96%, 97%, 98%, 99%, or 100%) identity to SEQ ID NO: 1339 or SEQ ID NO: 1341, and pharmaceutically acceptable excipients. Such a tablet may be coated with an enteric coating. Contemplated tablets may include pharmaceutically acceptable excipients such as fillers, binders, disintegrants, and/or lubricants, as well as coloring agents, release agents, coating agents, sweetening, flavoring such as wintergreen, orange, xylitol, sorbitol, fructose, and maltodextrin, and perfuming agents, preservatives and/or antioxidants.

[0424] In some embodiments, contemplated pharmaceutical formulations include an intra-granular phase that includes a disclosed STMN2 oligonucleotide, e.g., a STMN2 oligonucleotide represented by any of SEQ ID NOs: 1-466, SEQ ID NO: 893-1338, SEQ ID NOs: 1342-1366, and SEQ ID NOs: 1392-1664 that targets a STMN2 transcript comprising a sequence that shares at least 90% (e.g., 90%, 91%, 92%, 93%, 94%, 95%, 96%, 97%, 98%, 99%, or 100%) identity to SEQ ID NO: 1339 or SEQ ID NO: 1341, and a pharmaceutically acceptable salt. In some embodiments, contemplated pharmaceutical formulations include an intra-granular phase that includes a disclosed STMN2 oligonucleotide, e.g., a STMN2 oligonucleotide represented by any of SEQ ID NOs: 1-466, SEQ ID NO: 893-1338, SEQ ID NOs: 1342-1366, and SEQ ID NOs: 1392-1664 that targets a STMN2 transcript comprising a sequence that shares at least 90% (e.g., 90%, 91%, 92%, 93%, 94%, 95%, 96%, 97%, 98%, 99%, or 100%) identity to SEQ ID NO: 1339 or SEQ ID NO: 1341, and a pharmaceutically acceptable filler. For example, a disclosed STMN2 oligonucleotide and a filler may be blended together, optionally, with other excipients, and formed into granules. In some embodiments, the intragranular phase may be formed using wet granulation, e.g., a liquid (e.g., water) is added to the blended STMN2 oligonucleotide and filler, and then the combination is dried, milled and/or sieved to produce granules. One of skill in the art would understand that other processes may be used to achieve an intragranular phase.

[0425] In some embodiments, contemplated formulations include an extra-granular phase, which may include one or more pharmaceutically acceptable excipients, and which may be blended with the intragranular phase to form a disclosed formulation.

[0426] A disclosed formulation may include an intragranular phase that includes a filler. Exemplary fillers include, but are not limited to, cellulose, gelatin, calcium phosphate, lactose, sucrose, glucose, mannitol, sorbitol, microcrystalline cellulose, pectin, polyacrylates, dextrose, cellulose acetate, hydroxypropylmethyl cellulose, partially pre-gelatinized starch, calcium carbonate, and others including combinations thereof.

[0427] In some embodiments, a disclosed formulation may include an intragranular phase and/or an extragranular phase that includes a binder, which may generally function to hold the ingredients of the pharmaceutical formulation together. Exemplary binders of the disclosure may include, but are not limited to, the following: starches, sugars, cellulose or modified cellulose such as hydroxypropyl cellulose, lactose, pre-gelatinized maize starch, polyvinyl pyrrolidone, hydroxypropyl cellulose, hydroxypropylmethyl cellulose, low substituted hydroxypropyl cellulose, sodium carboxymethyl cellulose, methyl cellulose, ethyl cellulose, sugar alcohols and others including combinations thereof.

[0428] Contemplated formulations, e.g., that include an intragranular phase and/or an extragranular phase, may include a disintegrant such as but not limited to, starch, cellulose, crosslinked polyvinyl pyrrolidone, sodium starch glycolate, sodium carboxymethyl cellulose, alginates, corn starch, crosmellose sodium, crosslinked carboxymethyl cellulose, low substituted hydroxypropyl cellulose, acacia, and others including combinations thereof. For example, an intragranular phase and/or an extragranular phase may include a disintegrant.

[0429] In some embodiments, a contemplated formulation includes an intra-granular phase comprising a disclosed STMN2 oligonucleotide and excipients chosen from: mannitol, microcrystalline cellulose, hydroxypropylmethyl cellulose, and sodium starch glycolate or combinations thereof, and an extra-granular phase comprising one or more of: microcrystalline cellulose, sodium starch glycolate, and magnesium stearate or mixtures thereof.

[0430] In some embodiments, a contemplated formulation may include a lubricant, e.g. an extra-granular phase may contain a lubricant. Lubricants include but are not limited to talc, silica, fats, stearin, magnesium stearate, calcium phosphate, silicone dioxide, calcium silicate, calcium phosphate, colloidal silicon dioxide, metallic stearates, hydrogenated vegetable oil, corn starch, sodium benzoate, polyethylene glycols, sodium acetate, calcium stearate, sodium lauryl sulfate, sodium chloride, magnesium lauryl sulfate, talc, and stearic acid.

[0431] In some embodiments, the pharmaceutical formulation comprises an enteric coating. Generally, enteric coatings create a barrier for the oral medication that controls the location at which the drug is absorbed along the digestive track. Enteric coatings may include a polymer that disintegrates at different rates according to pH. Enteric coatings may include for example, cellulose acetate phthalate, methyl acrylate-methacrylic acid copolymers, cellulose acetate succinate, hydroxylpropylmethyl cellulose phthalate, methyl methacrylate-methacrylic acid copolymers, ethylacrylate-methacrylic acid copolymers, methacrylic acid copolymer type C, polyvinyl acetate-phthalate, and cellulose acetate phthalate.

[0432] Exemplary enteric coatings include Opadry® AMB, Acryl-EZE, Eudragit® grades. In some embodiments, an enteric coating may comprise about 5% to about 10%, about 5% to about 20%, 8% to about 15%, about 8% to about 20%, about 10% to about 20%, or about 12% to about 20%, or about 18% of a contemplated tablet by weight. For example, enteric coatings may include an ethylacrylate-methacrylic acid copolymer.

[0433] For example, in a contemplated embodiment, a tablet is provided that comprises or consists essentially of about 0.5% to about 70%, e.g., about 0.5% to about 10%, or about 1% to about 20%, by weight of a disclosed STMN2 oligonucleotide or a pharmaceutically acceptable salt thereof. Such a tablet may include for example, about 0.5% to about 60% by weight of mannitol, e.g., about 30% to about 50% by weight mannitol, e.g., about 40% by weight mannitol; and/or about 20% to about 40% by weight of microcrystalline cellulose, or about 10% to about 30% by weight of microcrystalline cellulose. For example, a disclosed tablet may comprise an intragranular phase that includes about 30% to about 60%, e.g. about 45% to about 65% by weight, or alternatively, about 5 to about 10% by weight of a disclosed STMN2 oligonucleotide, about 30% to about 50%, or alternatively, about 5% to about 15% by weight mannitol, about 5% to about 15% microcrystalline cellulose, about 0% to about 4%, or about 1% to about 7% hydroxypropylmethylcellulose, and about 0% to about 4%, e.g., about 2% to about 4% sodium starch glycolate by weight.

[0434] In another contemplated embodiment, a pharmaceutical tablet formulation for oral administration of a disclosed STMN2 oligonucleotide comprises an intra-granular phase, wherein the intra-granular phase includes a disclosed STMN2 AON or a pharmaceutically acceptable salt thereof (such as a sodium salt), and a pharmaceutically acceptable filler, and which may also include an extra-granular phase, that may include a pharmaceutically acceptable excipient such as a disintegrant. The extra-granular phase may include components chosen from microcrystalline cellulose, magnesium stearate, and mixtures thereof. The pharmaceutical composition may also include an enteric coating of about 12% to 20% by weight of the tablet. For example, a pharmaceutically acceptable tablet for oral use may comprise about 0.5% to 10% by weight of a disclosed STMN2 AON, e.g., a disclosed STMN2 AON or a pharmaceutically acceptable salt thereof, about 30% to 50% by weight mannitol, about 10% to 30% by weight microcrystalline cellulose, and an enteric coating comprising an ethylacrylate-methacrylic acid copolymer.

[0435] In another example, a pharmaceutically acceptable tablet for oral use may comprise an intra-granular phase, comprising about 5 to about 10% by weight of a disclosed STMN2 AON, e.g., a disclosed STMN2 AON or a pharmaceutically acceptable salt thereof, about 40% by weight mannitol, about 8% by weight microcrystalline cellulose, about 5% by weight hydroxypropylmethyl cellulose, and about 2% by weight sodium starch glycolate; an extra-granular phase comprising about 17% by weight microcrystalline cellulose, about 2% by weight sodium starch glycolate, about 0.4% by weight magnesium stearate; and an enteric coating over the tablet comprising an ethylacrylate-methacrylic acid copolymer.

[0436] In some embodiments the pharmaceutical composition may contain an enteric coating comprising about 13% or about 15%, 16%, 17% or 18% by weight, e.g., AcyrlEZE® (see, e.g., PCT Publication No. WO 2010/054826, which is hereby incorporated by reference in its entirety).

[0437] The rate at which the coating dissolves and the active ingredient is released is its dissolution rate. In an embodiment, a contemplated tablet may have a dissolution profile, e.g., when tested in a USP/EP Type 2 apparatus (paddle) at 100 rpm and 37° C. in a phosphate buffer with a pH of 7.2, of about 50% to about 100% of the STMN2 oligonucleotide releasing after about 120 minutes to about 240 minutes, for example after 180 minutes. In another embodiment, a contemplated tablet may have a dissolution profile, e.g., when tested in a USP/EP Type 2 apparatus (paddle) at 100 rpm and 37° C. in diluted HCl with a pH of 1.0, where substantially none of the STMN2 oligonucleotide is released after 120 minutes. A contemplated tablet, in another embodiment, may have a dissolution profile, e.g., when tested in USP/EP Type 2 apparatus (paddle) at 100 rpm and 37° C. in a phosphate buffer with a pH of 6.6, of about 10% to about 30%, or not more than about 50% of the STMN2 oligonucleotide releasing after 30 minutes.

[0438] In some embodiments, methods provided herein may further include administering at least one other agent that is directed to treatment of diseases and disorders disclosed herein. In one embodiment, contemplated other agents may be co-administered (e.g., sequentially or simultaneously).

### Dosage and Frequency of Administration

[0439] The dosage or amounts described below refer either to the oligonucleotide or a pharmaceutically acceptable salt thereof.

[0440] In some embodiments, methods described herein include administering at least 1 μg, at least 5 μg, at least 10 μg, at least 20 μg, at least 30 μg, at least 40 μg, at least 50 μg, at least 60 μg, at least 70 μg, at least 80 μg, at least 90 μg, or at least 100 μg of a STMN2 antisense oligonucleotide e.g., a STMN2 oligonucleotide. In some embodiments, methods include administering from 10 mg to 500 mg, from 1 mg to 10 mg, from 10 mg to 20 mg, from 20 mg to 30 mg, from 30 mg to 40 mg, from 40 mg to 50 mg, from 50 mg to 60 mg, from 60 mg to 70 mg, from 70 mg to 80 mg, from 80 mg to 90 mg, from 90 mg to 100 mg, from 100 mg to 150 mg, from 150 mg to 200 mg, from 200 mg to 250 mg, from 250 mg to 300 mg, from 300 mg to 350 mg, from 350 mg to 400 mg, from 400 mg to 450 mg, from 450 mg to 500 mg, from 500 mg to 600 mg, from 600 mg to 700 mg, from 700 mg to 800 mg, from 800 mg to 900 mg, from 900 mg to 1 g, from 1 mg to 50 mg, from 20 mg to 40 mg, or from 1 mg to 500 mg of a STMN2 antisense oligonucleotide.

[0441] In some embodiments, methods described herein include administering formulations that include about 10 mg, 15 mg, 20 mg, 25 mg, 30 mg, 35 mg, 40 mg, 50 mg, 60 mg, 70 mg, 80 mg, 90 mg, 100 mg, 110 mg, 120 mg, 130 mg, 140 mg, 150 mg, 160 mg, 170 mg, 180 mg, 190 mg, 200 mg, 250 mg, 300 mg, 350 mg, 400 mg, 450 mg, 500 mg, 600 mg, 700 mg, 800 mg, 900 mg, 1 g, 1.5 g, 2.0 g, 2.5 g, 3.0 g, 3.5 g, 4.0 g, 4.5 g, or 5.0 g of a disclosed STMN2 oligonucleotide. In some embodiments, a formulation may include about 40 mg, 80 mg, or 160 mg of a disclosed STMN2 oligonucleotide. In some embodiments, a formulation may include at least 100 μg of a disclosed STMN2 oligonucleotide. For example, formulations may include about 0.1 mg, 0.2 mg, 0.3 mg, 0.4 mg, 0.5 mg, 1 mg, 5 mg, 10 mg, 15 mg, 20 mg, 25 mg, or 30 mg of a disclosed STMN2 oligonucleotide. The amount administered will depend on variables such as the type and extent of disease or indication to be treated, the overall health and size of the patient, the in vivo potency of the STMN2 oligonucleotide, the pharmaceutical formulation, and the route of administration. The initial dosage can be increased beyond the upper level in order to rapidly achieve the desired blood-level or tissue level. Alternatively, the initial dosage can be smaller than the optimum, and the dosage may be progressively increased during the course of treatment. Human dosage can be optimized, e.g., in a conventional Phase I dose escalation study. Dosing frequency can vary, depending on factors such as route of administration, dosage amount and the disease being treated. Exemplary dosing frequencies are once per day, once per week and once every two weeks. In some embodiments, dosing is once per day for 7 days. In some embodiments, dosing is once every 4 weeks, once every 5 weeks, once every 6 weeks, once every 7 weeks, once every 8 weeks, once every 9 weeks, once every 10 weeks, once every 11 weeks, or once every 12 weeks. In some embodiments, dosing is once a month to every three months.

### Combination Therapies

[0442] In various embodiments, a STMN2 AON as disclosed herein can be administered in combination with one or more additional therapies. The combination therapy of the disclosed oligonucleotide and the one or more additional therapies can, in some embodiments, be synergistic in treating any of amyotrophic lateral sclerosis (ALS), frontotemporal dementia (FTD), ALS with FTD, Alzheimer's disease (AD), Parkinson's disease (PD), Huntington's disease, progressive supranuclear palsy (PSP), brain trauma, spinal cord injury, corticobasal degeneration (CBD), nerve injuries (e.g., brachial plexus injuries), neuropathies (e.g., chemotherapy induced neuropathy), and TDP43 proteinopathies (e.g., chronic traumatic encephalopathy, Perry Syndrome, Dementia with Lewy body in association with Alzheimer's disease, Parkinson's disease with or without dementia, and Limbic-predominant age-related TDP-43 encephalopathy (LATE)).

[0443] Example additional therapies include any of Riluzole (Rilutek), Edaravone (Radicava), rivastigmine, donepezil, galantamine, selective serotonin reuptake inhibitor, antipsychotic agents, cholinesterase inhibitors, memantine, benzodiazepine antianxiety drugs, AMX0035 (ELYBRIO), ZILUCOPLAN (RA101495), pridopidine, dual AON intrathecal administration (e.g., BIIB067, BIIB078, and BIIB105), BIIB100, levodopa/carbidopa, dopaminergic agents (e.g., ropinirole, pramipexole, rotigotine), medroxyprosterone, KCNQ2/KCNQ3 openers (e.g., retigabine, XEN1101, or QRL-101), anticonvulsants and psychostimulant agents. Additional therapies can further include breathing care, physical therapy, occupational therapy, speech therapy, and nutritional support. In various embodiments, an additional therapy can be a second antisense oligonucleotide. As an example, the second antisense oligonucleotide may target a STMN2 transcript (e.g., STMN2 pre-mRNA, mature STMN2 mRNA) to modulate the expression levels of full length STMN2 protein.

[0444] In various embodiments, the disclosed oligonucleotide and the one or more additional therapies can be conjugated to one another and provided in a conjugated form. Further description regarding conjugates involving the disclosed oligonucleotide is described below. In various embodiments, the disclosed oligonucleotide and one or more additional therapies are provided concurrently. In various embodiments, the disclosed oligonucleotide and one or more additional therapies are provided simultaneously. In various embodiments, the disclosed oligonucleotide and one or more additional therapies are provided sequentially.

### Conjugates

[0445] In certain embodiments, provided herein are oligomeric compounds, which comprise an oligonucleotide (e.g., STMN2 oligonucleotide) and optionally one or more conjugate groups and/or terminal groups. Conjugate groups include one or more conjugate moiety and a conjugate linker which links the conjugate moiety to the oligonucleotide. Conjugate groups may be attached to either or both ends of an oligonucleotide and/or at any internal position. In certain embodiments, conjugate groups are attached to the 2′-position of a nucleoside of a modified oligonucleotide. In certain embodiments, conjugate groups that are attached to either or both ends of an oligonucleotide are terminal groups. In certain such embodiments, conjugate groups or terminal groups are attached at the 3′ and/or 5′-end of oligonucleotides. In certain such embodiments, conjugate groups (or terminal groups) are attached at the 3′-end of oligonucleotides. In certain embodiments, conjugate groups are attached near the 3′-end of oligonucleotides. In certain embodiments, conjugate groups (or terminal groups) are attached at the 5′-end of oligonucleotides. In certain embodiments, conjugate groups are attached near the 5′-end of oligonucleotides.

[0446] Examples of terminal groups include but are not limited to conjugate groups, capping groups, phosphate moieties, protecting groups, modified or unmodified nucleosides, and two or more nucleosides that are independently modified or unmodified.

### Conjugate Groups

[0447] In certain embodiments, a STMN2 AON is covalently attached to one or more conjugate groups. In certain embodiments, conjugate groups modify one or more properties of the attached oligonucleotide, including but not limited to pharmacodynamics, pharmacokinetics, stability, binding, absorption, tissue distribution, cellular distribution, cellular uptake, charge and clearance. In particular embodiments, conjugate groups modify the circulation time (e.g., increase) of the oligonucleotides in the bloodstream such that increased concentrations of the oligonucleotides are delivered to the brain. In particular embodiments, conjugate groups modify the residence time (e.g., increase residence time) of the oligonucleotides in a target organ (e.g., brain) such that increased residence time of the oligonucleotides improves their performance (e.g., efficacy). In particular embodiments, conjugate groups increase the delivery of the oligonucleotide to the brain through the blood brain barrier and/or brain parenchyma (e.g., through receptor mediated transcytosis). In particular embodiments, conjugate groups enable the oligonucleotide to target a specific organ (e.g., the brain). In certain embodiments, conjugate groups impart a new property on the attached oligonucleotide, e.g., fluorophores or reporter groups that enable detection of the oligonucleotide. Certain conjugate groups and conjugate moieties have been described previously, for example: cholesterol moiety (Letsinger et al., Proc. Natl. Acad. Sci. USA, 1989, 86, 6553-6556), cholic acid (Manoharan et al., Bioorg. Med. Chem. Lett., 1994, 4, 1053-1060), a thioether, e.g., hexyl-S-tritylthiol (Manoharan et al., Ann. NY. Acad. Sci., 1992, 660, 306-309; Manoharan et al., Bioorg. Med. Chem. Lett., 1993, 3, 2765-2770), a thiocholesterol (Oberhauser et al., Nucl. Acids Res., 1992, 20, 533-538), an aliphatic chain, e.g., do-decan-diol or undecyl residues (Saison-Behmoaras et al., EMBO J, 1991, 10, 1111-1118; Kabanov et al., FEBS Lett., 1990, 259, 327-330; Svinarchuk et al., Biochimie, 1993, 75, 49-54), a phospholipid, e.g., di-hexadecyl-rac-glycerol or triethyl-ammonium 1,2-di-O-hexadecyl-rac-glycero-3-H-phosphonate (Manoharan et al., Tetrahedron Lett., 1995, 36, 3651-3654; Shea et al., Nucl. Acids Res., 1990, 18, 3777-3783), a polyamine or a polyethylene glycol chain (Manoharan et al., Nucleosides & Nucleotides, 1995, 14, 969-973), or adamantane acetic acid a palmityl moiety (Mishra et al., Biochim. Biophys. Acta, 1995, 1264, 229-237), an octadecylamine or hexylamino-carbonyl-oxycholesterol moiety (Crooke et al., J. Pharmacol. Exp. Ther., 1996, 277, 923-937), a tocopherol group (Nishina et Molecular Therapy Nucleic Acids, 2015, 4, e220; and Nishina et al., Molecular Therapy, 2008, 16, 734-740), or a GalNAc cluster (e.g., WO2014/179620).

### Conjugate Moieties

[0448] Conjugate moieties include, without limitation, intercalators, reporter molecules, polyamines, polyamides, peptides, carbohydrates, vitamin moieties, polyethylene glycols, thioethers, polyethers, cholesterols, thiocholesterols, cholic acid moieties, folate, lipids, phospholipids, biotin, phenazine, phenanthridine, anthraquinone, adamantane, acridine, fluoresceins, rhodamines, coumarins, fluorophores, and dyes. In particular embodiments, conjugate moieties are selected from a peptide, a lipid, N-acetylgalactosamine (GalNAc), cholesterol, vitamin E, lipoic acid, panthothenic acid, polyethylene glycol, an antibody (e.g., an antibody for crossing the blood brain barrier such as anti-transferrin receptor antibody), or a cell-penetrating peptide (e.g., transactivator of transcription (TAT) and penetratine).

[0449] In certain embodiments, a conjugate moiety comprises an active drug substance, for example, aspirin, warfarin, phenylbutazone, ibuprofen, suprofen, fenbufen, ketoprofen, (S)-(+)-pranoprofen, carprofen, dansylsarcosine, 2,3,5-triiodobenzoic acid, fingolimod, flufenamic acid, folinic acid, a benzothiadiazide, chlorothiazide, a diazepine, indomethacin, a barbiturate, a cephalosporin, a sulfa drug, an antidiabetic, an antibacterial or an antibiotic.

### Conjugate Linkers

[0450] Conjugate moieties are attached to a STMN2 AON through conjugate linkers. In certain oligomeric compounds, the conjugate linker is a single chemical bond (i.e., the conjugate moiety is attached directly to an oligonucleotide through a single bond). In certain embodiments, the conjugate linker comprises a chain structure, such as a hydrocarbon chain, or an oligomer of repeating units such as ethylene glycol, nucleosides, or amino acid units.

[0451] In certain embodiments, a conjugate linker comprises one or more groups selected from alkyl, amino, oxo, amide, disulfide, polyethylene glycol, ether, thioether, and hydroxylamino. In certain such embodiments, the conjugate linker comprises groups selected from alkyl, amino, oxo, amide and ether groups. In certain embodiments, the conjugate linker comprises groups selected from alkyl and amide groups. In certain embodiments, the conjugate linker comprises groups selected from alkyl and ether groups. In certain embodiments, the conjugate linker comprises at least one phosphorus moiety. In certain embodiments, the conjugate linker comprises at least one phosphate group. In certain embodiments, the conjugate linker includes at least one neutral linking group.

[0452] In certain embodiments, conjugate linkers, including the conjugate linkers described above, are bifunctional linking moieties, e.g., those known in the art to be useful for attaching conjugate groups to parent compounds, such as the oligonucleotides provided herein. In general, a bifunctional linking moiety comprises at least two functional groups. One of the functional groups is selected to bind to a particular site on a parent compound and the other is selected to bind to a conjugate group. Examples of functional groups used in a bifunctional linking moiety include but are not limited to electrophiles for reacting with nucleophilic groups and nucleophiles for reacting with electrophilic groups. In certain embodiments, bifunctional linking moieties comprise one or more groups selected from amino, hydroxyl, carboxylic acid, thiol, alkyl, alkenyl, and alkynyl.

[0453] Examples of conjugate linkers include but are not limited to pyrrolidine, 8-amino-3,6-dioxaoctanoic acid (ADO), succinimidyl 4-(N-maleimidomethyl) cyclohexane-1-carboxylate (SMCC) and 6-aminohexanoic acid (AHEX or AHA). Other conjugate linkers include but are not limited to substituted or unsubstituted C₁-C₁₀ alkyl, substituted or unsubstituted C₂-C₁₀ alkenyl or substituted or unsubstituted C₂-C₁₀ alkynyl, wherein a nonlimiting list of preferred substituent groups includes hydroxyl, amino, alkoxy, carboxy, benzyl, phenyl, nitro, thiol, thioalkoxy, halogen, alkyl, aryl, alkenyl and alkynyl.

[0454] In certain embodiments, conjugate linkers comprise 1-10 linker-nucleosides. In certain embodiments, conjugate linkers comprise 2-5 linker-nucleosides. In certain embodiments, conjugate linkers comprise 3 linker-nucleosides.

[0455] In certain embodiments, such linker-nucleosides are modified nucleosides. In certain embodiments such linker-nucleosides comprise a modified sugar moiety. In certain embodiments, linker-nucleosides are unmodified. In certain embodiments, linker-nucleosides comprise an optionally protected heterocyclic base selected from a purine, substituted purine, pyrimidine or substituted pyrimidine. In certain embodiments, a cleavable moiety is a nucleoside selected from uracil, thymine, cytosine, 4-N-benzoylcytosine, 5-methyl cytosine, 4-N-benzoyl-5-methyl cytosine, adenine, 6-N-benzoyladenine, guanine and 2-N-isobutyrylguanine. It is typically desirable for linker-nucleosides to be cleaved from the oligomeric compound after it reaches a target tissue. Accordingly, linker-nucleosides are typically linked to one another and to the remainder of the oligomeric compound through cleavable bonds. In certain embodiments, such cleavable bonds are phosphodiester bonds.

[0456] Herein, linker-nucleosides are not considered to be part of the oligonucleotide. Accordingly, in embodiments in which an oligomeric compound comprises an oligonucleotide consisting of a specified number or range of linked nucleosides and/or a specified percent complementarity to a reference nucleic acid and the oligomeric compound also comprises a conjugate group comprising a conjugate linker comprising linker-nucleosides, those linker-nucleosides are not counted toward the length of the oligonucleotide and are not used in determining the percent complementarity of the oligonucleotide for the reference nucleic acid.

[0457] In certain embodiments, it is desirable for a conjugate group to be cleaved from the STMN2 AON. For example, in certain circumstances oligomeric compounds comprising a particular conjugate moiety are better taken up by a particular cell type, but once the oligomeric compound has been taken up, it is desirable that the conjugate group be cleaved to release the unconjugated or parent oligonucleotide. Thus, certain conjugate linkers may comprise one or more cleavable moieties. In certain embodiments, a cleavable moiety is a cleavable bond. In certain embodiments, a cleavable moiety is a group of atoms comprising at least one cleavable bond. In certain embodiments, a cleavable moiety comprises a group of atoms having one, two, three, four, or more than four cleavable bonds. In certain embodiments, a cleavable moiety is selectively cleaved inside a cell or subcellular compartment, such as a lysosome. In certain embodiments, a cleavable moiety is selectively cleaved by endogenous enzymes, such as nucleases.

[0458] In certain embodiments, a cleavable bond is selected from among: an amide, an ester, an ether, one or both esters of a phosphodiester, a phosphate ester, a carbamate, or a disulfide. In certain embodiments, a cleavable bond is one or both of the esters of a phosphodiester. In certain embodiments, a cleavable moiety comprises a phosphate or phosphodiester. In certain embodiments, the cleavable moiety is a phosphate linkage between an oligonucleotide and a conjugate moiety or conjugate group.

[0459] In certain embodiments, a cleavable moiety comprises or consists of one or more linker-nucleosides. In certain such embodiments, the one or more linker-nucleosides are linked to one another and/or to the remainder of the oligomeric compound through cleavable bonds. In certain embodiments, such cleavable bonds are unmodified phosphodiester bonds. In certain embodiments, a cleavable moiety is 2′-deoxy nucleoside that is attached to either the 3′ or 5′-terminal nucleoside of an oligonucleotide by a phosphate internucleoside linkage and covalently attached to the remainder of the conjugate linker or conjugate moiety by a phosphate or phosphorothioate linkage. In certain such embodiments, the cleavable moiety is 2′-deoxy adenosine.

### Terminal Groups

[0460] In certain embodiments, oligomeric compounds comprise one or more terminal groups. In certain such embodiments, oligomeric compounds comprise a stabilized 5′-phosphate. Stabilized 5′-phosphates include, but are not limited to 5′-phosphonates, including, but not limited to 5′-vinylphosphonates. In certain embodiments, terminal groups comprise one or more abasic nucleosides and/or inverted nucleosides. In certain embodiments, terminal groups comprise one or more 2′-linked nucleosides. In certain such embodiments, the 2′-linked nucleoside is an abasic nucleoside. In various embodiments, terminal groups comprise one or more spacers.

### Diagnostic Methods

[0461] The disclosure also provides a method of diagnosing a patient with a neurological disease that relies upon detecting levels of STMN2 expression signal in one or more biological samples of a patient. As used herein, the term “STMN2 expression signal” can refer to any indication of STMN2 gene expression, or gene or gene product activity. STMN2 gene products include RNA (e.g., mRNA), peptides, and proteins. Indices of STMN2 gene expression that can be assessed include, but are not limited to, STMN2 gene or chromatin state, STMN2 gene interaction with cellular components that regulate gene expression, STMN2 gene product expression levels (e.g., expression levels of STMN2 transcripts (for example, a STMN2 pre-mRNA comprising a cryptic exon) comprising a sequence that shares at least 90% (e.g., 90%, 91%, 92%, 93%, 94%, 95%, 96%, 97%, 98%, 99%, or 100%) identity to SEQ ID NO: 1339 or SEQ ID NO: 1341, or interaction of STMN2 RNA or protein with transcriptional, translational, or post-translational processing machinery.

[0462] Detection of STMN2 expression signal may be accomplished through in vivo, in vitro, or ex vivo methods. In a preferred embodiment, methods of the disclosure may be carried out in vitro. Methods of detecting may involve detection in blood, serum, fecal matter, tissue, cerebrospinal fluid, spinal fluid, extracellular vesicles (for example, CSF exosomes), or cells of a patient. Detection may be achieved by measuring expression signal of STMN2 transcripts (for example, a STMN2 pre-mRNA comprising a cryptic exon) comprising a sequence that shares at least 90% (e.g., 90%, 91%, 92%, 93%, 94%, 95%, 96%, 97%, 98%, 99%, or 100%) identity to SEQ ID NO: 1339 or SEQ ID NO: 1341 in whole tissue, tissue explants, cell cultures, dissociated cells, cell extract, extracellular vesicles (for example, CSF exosomes), or body fluids, including blood, spinal fluid, cerebrospinal fluid, urine, lymphatic fluid, or serum. Methods of detection include assays that measure levels of STMN2 gene product expression such as Western blotting, FACS, ELISA, other quantitative binding assays, cell or tissue growth assays, Northern blots, quantitative or semi-quantitative polymerase chain reaction, medical imaging methods (e.g., MRI), or immunostaining methods (e.g., immunohistochemistry or immunocytochemistry).

### Modifications in General

[0463] While certain compounds, compositions and methods described herein have been described with specificity in accordance with certain embodiments, the following examples serve only to illustrate the compounds described herein and are not intended to limit the same. Each of the references, GenBank accession numbers, and the like recited in the present application is incorporated herein by reference in its entirety.

[0464] Although the sequence listing accompanying this filing identifies each sequence as either “RNA” or “DNA” as required, in reality, those sequences may be modified with any combination of chemical modifications. One of skill in the art will readily appreciate that such designation as “RNA” or “DNA” to describe modified oligonucleotides is, in certain instances, arbitrary. For example, an oligonucleotide comprising a nucleoside comprising a 2′-OH sugar moiety and a thymine base could be described as a DNA having a modified sugar (2′-OH in place of one 2′-H of DNA) or as an RNA having a modified base (thymine (methylated uracil) in place of a uracil of RNA). Accordingly, nucleic acid sequences provided herein, including, but not limited to those in the sequence listing, are intended to encompass nucleic acids containing any combination of natural or modified RNA and/or DNA, including, but not limited to such nucleic acids having modified nucleobases. By way of further example and without limitation, an oligomeric compound having the nucleobase sequence “ATCGATCG” encompasses any oligomeric compounds having such nucleobase sequence, whether modified or unmodified, including, but not limited to, such compounds comprising RNA bases, such as those having sequence “AUCGAUCG” and those having some DNA bases and some RNA bases such as “AUCGATCG” and oligomeric compounds having other modified nucleobases, such as “AT^{m}CGAUCG,” wherein ^{m}C indicates a cytosine base comprising a methyl group at the 5-position.

[0465] Certain compounds described herein (e.g., modified oligonucleotides) have one or more asymmetric center and thus give rise to enantiomers, diastereomers, and other stereoisomeric configurations that may be defined, in terms of absolute stereochemistry, as ® or (S), as α or β such as for sugar anomers, or as (D) or (L), such as for amino acids, etc. Compounds provided herein that are drawn or described as having certain stereoisomeric configurations include only the indicated compounds. Compounds provided herein that are drawn or described with undefined stereochemistry included all such possible isomers, including their stereorandom and optically pure forms, unless specified otherwise. Likewise, all tautomeric forms of the compounds herein are also included unless otherwise indicated. Unless otherwise indicated, compounds described herein are intended to include corresponding salt forms.

[0466] The compounds described herein include variations in which one or more atoms are replaced with a non-radioactive isotope or radioactive isotope of the indicated element. For example, compounds herein that comprise hydrogen atoms encompass all possible deuterium substitutions for each of the ¹H hydrogen atoms. Isotopic substitutions encompassed by the compounds herein include but are not limited to: ²H or ³H in place of ¹H, ¹³C or ¹⁴C in place of ¹²C, ¹⁵N in place of ¹⁴N, ¹⁷O or ¹⁸O in place of and ³³S, ³⁴S, ³⁵S, or ³⁶S in place of ³²S. In certain embodiments, non-radioactive isotopic substitutions may impart new properties on the oligomeric compound that are beneficial for use as a therapeutic or research tool.

### EXAMPLES

[0467] The disclosure is further illustrated by the following examples. The examples are provided for illustrative purposes only, and are not to be construed as limiting the scope or content of the disclosure in any way.

### Example 1: Design and Selection of STMN2 Oligonucleotides

[0468] STMN2 AONs oligonucleotides that target a STMN2 transcript including a cryptic exon are designed and tested to identify STMN2 AONs capable of reducing quantity of STMN2 transcripts that comprise a cryptic exon. Such STMN2 AONs include STMN2 parent oligonucleotides represented by any of SEQ ID NOs: 1-446 or SEQ ID NOs: 893-1338. The STMN2 parent oligonucleotides are 25 nucleosides in length. Each of the nucleosides of the STMN2 parent oligonucleotides are modified nucleosides with 2′MOE sugar moieties, and each “C” is replaced with a 5-MeC. Additionally, each of the internucleoside linkages between the nucleosides of the STMN2 oligonucleotides are phosphorothioate internucleoside linkages.

[0469] FIG. 1 is a depiction of portions of the STMN2 transcript and STMN2 parent oligonucleotides that are designed to target certain portions of the STMN2 transcript including a cryptic exon. Specifically, regions of the STMN2 transcript include branch points (e.g., branch point 1, 2, and 3) a 3′ splice acceptor region, an ESE binding region, TDP43 binding sites, and a Poly A region. STMN2 oligonucleotides, are identified according to the position of the STMN2 transcript that the STMN2 oligonucleotide corresponds to. For example, FIG. 1 depicts a STMN2 oligonucleotide that targets positions 36 to 60 of the STMN2 transcript including a cryptic exon, which includes a branch point 1. Similarly, a different STMN2 oligonucleotide targets positions 144 to 178 of the STMN2 transcript including a cryptic exon, which includes a branch point 3. Other STMN2 oligonucleotides can be designed using any of the sequences disclosed above.

[0470] Generally, the length of the STMN2 antisense oligonucleotides are 25 nucleotide bases in length. However, variants of the STMN2 antisense oligonucleotides were also designed with varying lengths (e.g., 23mers, 21mers, or 19mers). Examples of these variant STMN2 antisense oligonucleotides were designed to include the sequences of SEQ ID NOs: 1342-1366 or SEQ ID NOs: 1392-1521.

### Example 2: Methods for Evaluating STMN2 Antisense Oligonucleotides

[0471] STMN2 antisense oligonucleotides were evaluated in SY5Y cells and human motor neurons (hMN). The cells were plated in 6-well or 96-well plates and cultured to 80% confluency. Antisense oligonucleotide (AON) to TDP43 was transfected with RNAiMax (Thermo Fisher Scientific, Waltham, Mass., USA) to express the cryptic exon, thus preventing transcription of full-length STMN2 (STMN2-FL) product. Vehicle was treated with RNAiMax alone. Positive controls included cells that were treated with TDP43 siRNA alone (“siRNA TDP43”) and/or TDP43 AON alone (“AON TDP43” or “TDP43 AON”). siRNA TDP43 was purchased as ON-TARGETplus Human TARDBP (23435) siRNA-SMARTpool (#L-012394-00-0005) from Horizon/Dharmacon. TARDBP (23435) siRNA includes four individual siRNAs that targets four separate sequences:

| (SEQ ID NO: 1665) | |
|---|---|
| 1) Target sequence 1: | GCUCAAGCAUGGAUUCUAA |
| (SEQ ID NO: 1666) | |
| 2) Target sequence 2: | CAAUCAAGGUAGUAAUAUG |
| (SEQ ID NO: 1667) | |
| 3) Target sequence 3: | GGGCUUCGCUACAGGAAUC |
| (SEQ ID NO: 1668) | |
| 4) Target sequence 4: | CAGGGUGGAUUUGGUAAUA |

[0472] TDP43 AON is a gapmer oligonucleotide and has the following sequence and chemistry:

5′A*A*G*G*C*T*T*C*A*T*A*T*T*G*T*A*C*T*T*T 3′ (SEQ ID NO: 1669)

where * phosphorothioate, underlined=DNA, other=2A10E RNA; each “C” is 5-MeC.

[0473] To evaluate STMN2 AON ability to restore STMN2-FL, antisense oligonucleotides to STMN2 were co-incubated with TDP43 AON in RNAiMax. After 96 hours, transcript levels (e.g., STMN2 full length transcript, STMN2 transcript with cryptic exon, or TDP43 transcript) were detected by RT-qPCR using Taqman. Specifically, RT-qPCR was performed for detecting GAPDH using Thermofisher TaqMan Gene Expression Assay Hs03929097_g1. RT-qPCR was performed for detecting STMN2 transcripts with cryptic exon using the following primer sequences: 1) Forward primer: 5′-CTCAGTGCCTTATTCAGTCTTCTC-3′ (SEQ ID NO: 1670), 2) Reverse primer: 5′-TCTTCTGCCGAGTCCCATTT-3′ (SEQ ID NO: 1671) and 3) Probe: 5′-/56-FAM/TCAGCGTCTGCACATCCCTACAAT/3BHQ_1/-3′ (SEQ ID NO: 1672). RT-qPCR was performed for detecting full length STMN2 transcripts using the following primer sequences: 1) Forward primer: 5′-CCACGAACTTTAGCTTCTCCA-3′ (SEQ ID NO: 1673), 2) Reverse primer: 5′-GCCAATTGTTTCAGCACCTG-3′ (SEQ ID NO: 1674), and 3) Probe: 5′-/56-FAM/ACTTTCTTCTTTCCTCTGCAGCCTCC/3BHQ_1/-3′ (SEQ ID NO: 1675).

[0474] RT-qPCR was performed on Applied Biosystems® 7500 Real-time PCR systems. One cycle of reverse transcription was performed at a temperature of 50° C. for 5 min. One cycle of RT inactivation/initial denaturation was performed at a temperature of 95° C. for 20 seconds. Forty five cycles of amplification were performed at a temperature of 95° C. for 1 second followed by 60° C. for 20 seconds.

[0475] STMN2-FL or STMN2 cryptic signal (Ct) was normalized to GAPDH (deltaCt). To visualize the quantitative changes (e.g., % increase of STMN-FL), the normalized STMN2-FL signal was further normalized to the vehicle (treated with RNAiMax alone, deltadeltaCt). Relative quantity of transcript level was calculated using the equation RQ=2^{-deltadeltaCt} and is used to describe the treatment condition comparison to normal, healthy levels (1.0).

[0476] Percent decrease of STMN2 with cryptic exon expression was calculated using the equation of:

$$100 - ( \frac{\begin{matrix}Mean relative quantity of STMN2 with \\ cryptic exon in response to STMN2 AON\end{matrix}}{\begin{matrix}Mean relative quantity of STMN2 with \\ cryptic exon in response to TDP43 AON\end{matrix}} * 100 )$$

The percent increase of full length STMN2 mRNA transcript was calculated using the equation of:

$$( ( \frac{\begin{matrix}Mean relative quantity of FL STMN2 \\ transcript in response to STMN2 AON\end{matrix}}{\begin{matrix}Mean relative quantity of FL STMN2 \\ transcript in response to TDP43 AON\end{matrix}} ) * 100 ) - 100$$

[0477] STMN2 antisense oligonucleotides were also evaluated in human motor neurons for potency in reducing cryptic exon and increasing STMN2 full length transcript. iCell human motor neurons (Cellular Dynamics International) were plated at 15×10³ cells/well in a 96-well plate for RT-qPCR RNA quantification or 3×10⁵ cells/well in a 6-well plate for western blot protein quantification according to manufacturer's instructions. Neurons were transfected with TDP43 AON and/or STMN2 AON using endoporter (GeneTools, LLC.) or treated with endoporter alone. Treatment conditions were tested in biological triplicate (qRT-PCR) or duplicate (western blot) wells. The same TDP43 AON described above is used here for evaluating human motor neurons. TDP43 AON is a gapmer oligonucleotide and has the following sequence and chemistry:

(SEQ ID NO: 1669)
5’ A*A*G*G*C*T*T*C*A*T*A*T*T*G*T*A*C*T*T*T 3’

where *=phosphorothioate, underlined=DNA, other=2′MOE RNA.

[0478] After 72 hours, antisense oligonucleotides and endoporter were washed out and replaced with fresh media. After 72 additional hours, RNA was collected from the 96-well plates for RT-qPCR or protein collected from the 6-well plates for western blot. RNA was isolated, cDNA generated and multiplexed RT-qPCR assay performed with taqman probes for STMN2 cryptic exon, STMN2 full length transcript and reference GAPDH quantification. The same primers for detecting GAPDH, STMN2 transcript with cryptic exon, and full length STMN2, as described above in reference to SY5Y cells, were applied here for conducting RT-qPCR for human motor neurons. For protein quantification, the soluble portion of the protein collection was denatured and separated by SDS-PAGE, transferred to polyvinylidene difluoride membranes and probed with antibodies against GAPDH (Proteintech, 60004-1-1g), TDP-43 (Proteintech, 10782-2-AP), and Stathmin-2 (ThermoFisher, PA5-23049).

### Example 3: STMN2 Parent Oligonucleotides and Oligonucleotide Variants Restore Full Length STMN2 and Reduce STMN2 Transcripts with a Cryptic Exon

[0479] STMN2 parent oligonucleotides and oligonucleotide variants are tested for their ability to increase or restore full-length STMN2 mRNA (i.e., mRNA from which full-length STMN2 is translated) levels in TDP43 silenced cells. In some cases, STMN2 oligonucleotides are tested for their ability to reduce STMN2 transcripts with a cryptic exon. As described further below, the quantified percentage increase/restoration of STMN2-FL and/or percentage reduction of STMN2 transcripts with cryptic exon is described in reference to levels of STMN-FL and/or STMN2 transcripts with cryptic exon in a control group (e.g., cells treated with 500 nM TDP43 AON).

[0480] Referring to FIG. 2, TDP43 transcript was decreased by around 52% and STMN2-FL was decreased by around 57% when treated with 500 nM TDP43 AON. A 500 nM treatment of a STMN2 parent AON with SEQ ID NO: 36 increased TDP43 levels by 25% and increased STMN-FL levels by 55% (rescued to 67%). A 50 nM and a 500 nM treatment of a STMN2 parent oligonucleotide with SEQ ID NO: 177 increased STMN-FL levels by 58% (rescued to 66%) and 53% (rescued to 68%) respectively. A 500 nM treatment of a STMN2 parent oligonucleotide with SEQ ID NO: 203 increased TDP43 levels by 15% and STMN-FL levels by 72% (rescued to 74%). A 50 nM and a 500 nM treatment of a STMN2 parent oligonucleotide with SEQ ID NO: 395 increased STMN-FL levels by 49% (rescued to 64%) and 37% (rescued to 59%) respectively.

[0481] Referring to FIG. 3, the quantity of STMN2 transcript with cryptic exon was increased more than 20-fold when treated with 500 nM TDP43 AON. A 500 nM treatment of a STMN2 parent oligonucleotide with SEQ ID NO: 173 reduced STMN2 transcript with cryptic exon levels by 68%. A 500 nM treatment of a STMN2 parent oligonucleotide with SEQ ID NO: 181 reduced STMN2 transcript with cryptic exon levels by 65%. A 500 nM treatment of a STMN2 parent oligonucleotide with SEQ ID NO: 197 reduced STMN2 transcript with cryptic exon levels by 39%. A 500 nM treatment of a STMN2 parent oligonucleotide with SEQ ID NO: 215 reduced STMN2 transcript with cryptic exon levels by 31%. A 500 nM treatment of a STMN2 parent oligonucleotide with SEQ ID NO: 385 reduced STMN2 transcript with cryptic exon levels by 53%. A 500 nM treatment of a STMN2 parent oligonucleotide with SEQ ID NO: 400 reduced STMN2 transcript with cryptic exon levels by 74%.

[0482] Referring to FIG. 4, STMN2-FL was decreased by around 59% when treated with 500 nM TDP43 AON. A 500 nM treatment of a STMN2 parent oligonucleotide with SEQ ID NO: 173 increased STMN-FL levels by 66% (rescued to 68%). A 500 nM treatment of a STMN2 parent oligonucleotide with SEQ ID NO: 197 increased STMN-FL levels by 46% (rescued to 60%).

[0483] Referring to FIG. 5A, the quantity of STMN2 transcript with cryptic exon was increased more than 36-fold when treated with 500 nM TDP43 AON. A 500 nM treatment of a STMN2 parent oligonucleotide with SEQ ID NO: 185 reduced STMN2 transcript with cryptic exon levels by 58%. A 500 nM treatment of a STMN2 parent oligonucleotide with SEQ ID NO: 237 reduced STMN2 transcript with cryptic exon levels by 87%. A 500 nM treatment of a STMN2 parent oligonucleotide with SEQ ID NO: 380 reduced STMN2 transcript with cryptic exon levels by 70%. A 500 nM treatment of a STMN2 parent oligonucleotide with SEQ ID NO: 390 reduced STMN2 transcript with cryptic exon levels by 58%.

[0484] Referring to FIG. 5B, STMN2-FL was decreased by 66% when treated with 500 nM TDP43 AON. A 500 nM treatment of a STMN2 parent oligonucleotide with SEQ ID NO: 185 increased STMN-FL levels by 109% (rescued to 71%). A 500 nM treatment of a STMN2 parent oligonucleotide with SEQ ID NO: 237 increased STMN-FL levels by 247% (rescued to 118%).

[0485] Referring to FIG. 6A, the quantity of STMN2 transcript with cryptic exon was increased more than 20-fold when treated with 500 nM TDP43 AON (two different syntheses). A 500 nM treatment of a STMN2 parent oligonucleotide with SEQ ID NO: 144 reduced STMN2 transcript with cryptic exon levels by 83 to 88%. A 500 nM treatment of a STMN2 parent oligonucleotide with SEQ ID NO: 237 reduced STMN2 transcript with cryptic exon levels by 92 to 93%.

[0486] Referring to FIG. 6B, STMN2-FL was decreased by about 80% when treated with 500 nM TDP43 AON. A 500 nM treatment of a STMN2 parent oligonucleotide with SEQ ID NO: 144 increased STMN-FL levels by 276% to 329% (rescued to 79% to 90%). A 500 nM treatment of a STMN2 parent oligonucleotide with SEQ ID NO: 237 increased STMN-FL levels by 390% to 438% (rescued to 103% to 113%).

[0487] Referring to FIG. 7A, the quantity of STMN2 transcript with cryptic exon was increased more than 23-fold when treated with 500 nM TDP43 AON. A 500 nM treatment of a STMN2 parent oligonucleotide with SEQ ID NO: 173 reduced STMN2 transcript with cryptic exon levels by 83%. A 500 nM treatment of a STMN2 parent oligonucleotide with SEQ ID NO: 177 reduced STMN2 transcript with cryptic exon levels by 83%. A 500 nM treatment of a STMN2 parent oligonucleotide with SEQ ID NO: 181 reduced STMN2 transcript with cryptic exon levels by 72%.

[0488] Referring to FIG. 7B, STMN2-FL was decreased by about 58% when treated with 500 nM TDP43 AON. A 500 nM treatment of a STMN2 parent oligonucleotide with SEQ ID NO: 173 increased STMN-FL levels by 119% (rescued to 92%). A 500 nM treatment of a STMN2 parent oligonucleotide with SEQ ID NO: 181 increased STMN-FL levels by 88% (rescued to 79%). A 500 nM treatment of a STMN2 parent oligonucleotide with SEQ ID NO: 185 increased STMN-FL levels by 74% (rescued to 73%).

[0489] Referring to FIG. 8A, the quantity of STMN2 transcript with cryptic exon was increased more than 20-fold when treated with 500 nM TDP43 AON. A 500 nM treatment of a STMN2 parent oligonucleotide with SEQ ID NO: 197 reduced STMN2 transcript with cryptic exon levels by 65%. A 500 nM treatment of a STMN2 parent oligonucleotide with SEQ ID NO: 237 reduced STMN2 transcript with cryptic exon levels by 94%.

[0490] Referring to FIG. 8B, STMN2-FL was decreased by 59% when treated with 500 nM TDP43 AON. A 500 nM treatment of a STMN2 parent oligonucleotide with SEQ ID NO: 197 increased STMN-FL levels by 85% (rescued to 76%). A 500 nM treatment of a STMN2 parent oligonucleotide with SEQ ID NO: 237 increased STMN-FL levels by 127% (rescued to 93%). A 500 nM treatment of a STMN2 parent oligonucleotide with SEQ ID NO: 380 increased STMN-FL levels by 71% (rescued to 70%).

[0491] Referring to FIG. 9A, the quantity of STMN2 transcript with cryptic exon was increased more than 50-fold when treated with 500 nM TDP43 AON. A 500 nM treatment of a STMN2 parent oligonucleotide with SEQ ID NO: 144 reduced STMN2 transcript with cryptic exon levels by 92%. A 500 nM treatment of a STMN2 parent oligonucleotide with SEQ ID NO: 173 reduced STMN2 transcript with cryptic exon levels by 82%. A 500 nM treatment of a STMN2 parent oligonucleotide with SEQ ID NO: 237 reduced STMN2 transcript with cryptic exon levels by 96%.

[0492] Referring to FIG. 9B, STMN2-FL was decreased by 67% when treated with 500 nM TDP43 AON. A 500 nM treatment of a STMN2 parent oligonucleotide with SEQ ID NO: 144 increased STMN-FL levels by 135% (rescued to 87%). A 500 nM treatment of a STMN2 parent oligonucleotide with SEQ ID NO: 173 increased STMN-FL levels by 132% (rescued to 86%). A 500 nM treatment of a STMN2 parent oligonucleotide with SEQ ID NO: 237 increased STMN-FL levels by 143% (rescued to 90%).

[0493] Referring to FIG. 10A, the quantity of STMN2 transcript with cryptic exon was increased more than 65-fold when treated with 500 nM TDP43 AON. A 200 nM treatment of a STMN2 parent oligonucleotide with SEQ ID NO: 181 reduced STMN2 transcript with cryptic exon levels by 50%. A 500 nM treatment of a STMN2 parent oligonucleotide with SEQ ID NO: 181 reduced STMN2 transcript with cryptic exon levels by 73%. Referring to FIG. 10B, STMN2-FL was decreased by 67% when treated with 500 nM TDP43 AON. A 50 nM treatment of a STMN2 parent oligonucleotide with SEQ ID NO: 181 increased STMN-FL levels by 115% (rescued to 71%). A 200 nM treatment of a STMN2 parent oligonucleotide with SEQ ID NO: 181 increased STMN-FL levels by 97% (rescued to 65%). A 500 nM treatment of a STMN2 parent oligonucleotide with SEQ ID NO: 181 increased STMN-FL levels by 94% (rescued to 64%).

[0494] Referring to FIG. 11A, the quantity of STMN2 transcript with cryptic exon was increased more than 26-fold when treated with 500 nM TDP43 AON. A 500 nM treatment of a STMN2 parent oligonucleotide with SEQ ID NO: 185 reduced STMN2 transcript with cryptic exon levels by 47%. Referring to FIG. 11B, STMN2-FL was decreased by 74% when treated with 500 nM TDP43 AON. A 50 nM treatment of a STMN2 parent oligonucleotide with SEQ ID NO: 185 increased STMN-FL levels by 73% (rescued to 45%). A 200 nM treatment of a STMN2 parent oligonucleotide with SEQ ID NO: 185 increased STMN-FL levels by 246% (rescued to 90%). A 500 nM treatment of a STMN2 parent oligonucleotide with SEQ ID NO: 185 increased STMN-FL levels by 165% (rescued to 69%).

[0495] Referring to FIG. 12A, the quantity of STMN2 transcript with cryptic exon was increased more than 41-fold when treated with 500 nM TDP43 AON. A 500 nM treatment of a STMN2 parent oligonucleotide with SEQ ID NO: 197 reduced STMN2 transcript with cryptic exon levels by 51%. Referring to FIG. 12B, STMN2-FL was decreased by 65% when treated with 500 nM TDP43 AON. A 20 nM treatment of a STMN2 parent oligonucleotide with SEQ ID NO: 197 increased STMN-FL levels by 86% (rescued to 65%). A 50 nM treatment of a STMN2 parent oligonucleotide with SEQ ID NO: 197 increased STMN-FL levels by 131% (rescued to 81%). A 200 nM treatment of a STMN2 parent oligonucleotide with SEQ ID NO: 197 increased STMN-FL levels by 154% (rescued to 89%). A 500 nM treatment of a STMN2 parent oligonucleotide with SEQ ID NO: 197 increased STMN-FL levels by 169% (rescued to 94%).

[0496] Referring to FIG. 13A, the quantity of STMN2 transcript with cryptic exon was increased more than 41-fold when treated with 500 nM TDP43 AON. A 500 nM treatment of a STMN2 parent oligonucleotide with SEQ ID NO: 144 reduced STMN2 transcript with cryptic exon levels by 93%. Referring to FIG. 13B, STMN2-FL was decreased by 84% when treated with 500 nM TDP43 AON. A 50 nM treatment of a STMN2 parent oligonucleotide with SEQ ID NO: 144 increased STMN-FL levels by 75% (rescued to 28%). A 200 nM treatment of a STMN2 parent oligonucleotide with SEQ ID NO: 144 increased STMN-FL levels by 260% (rescued to 57%). A 500 nM treatment of a STMN2 parent oligonucleotide with SEQ ID NO: 144 increased STMN-FL levels by 444% (rescued to 87%).

[0497] Referring to FIG. 14A, the quantity of STMN2 transcript with cryptic exon was increased more than 24-fold when treated with 500 nM TDP43 AON. A 200 nM treatment of a STMN2 parent oligonucleotide with SEQ ID NO: 173 reduced STMN2 transcript with cryptic exon levels by 59%. A 500 nM treatment of a STMN2 parent oligonucleotide with SEQ ID NO: 173 reduced STMN2 transcript with cryptic exon levels by 70%. Referring to FIG. 14B, STMN2-FL was decreased by 62% when treated with 500 nM TDP43 AON. A 200 nM treatment of a STMN2 parent oligonucleotide with SEQ ID NO: 173 increased STMN-FL levels by 100% (rescued to 76%). A 500 nM treatment of a STMN2 parent oligonucleotide with SEQ ID NO: 173 increased STMN-FL levels by 158% (rescued to 98%).

[0498] Referring to FIG. 15A, the quantity of STMN2 transcript with cryptic exon was increased more than 70-fold when treated with 500 nM TDP43 AON. A 200 nM treatment of a STMN2 parent oligonucleotide with SEQ ID NO: 237 reduced STMN2 transcript with cryptic exon levels by 78%. A 500 nM treatment of a STMN2 parent oligonucleotide with SEQ ID NO: 237 reduced STMN2 transcript with cryptic exon levels by 92%. Referring to FIG. 15B, STMN2-FL was decreased by 77% when treated with 500 nM TDP43 AON. A 50 nM treatment of a STMN2 parent oligonucleotide with SEQ ID NO: 237 increased STMN-FL levels by 87% (rescued to 43%). A 200 nM treatment of a STMN2 parent oligonucleotide with SEQ ID NO: 237 increased STMN-FL levels by 135% (rescued to 54%). A 500 nM treatment of a STMN2 parent oligonucleotide with SEQ ID NO: 237 increased STMN-FL levels by 209% (rescued to 71%).

[0499] Referring to FIG. 16, STMN2 protein levels were decreased by 44% when treated with 500 nM TDP43 AON. A 500 nM treatment of a STMN2 parent oligonucleotide with SEQ ID NO: 173 increased STMN protein levels by 52%. A 500 nM treatment of a STMN2 parent oligonucleotide with SEQ ID NO: 237 increased STMN protein levels by 34%.

[0500] Referring to FIG. 17A, the quantity of STMN2 transcript with cryptic exon was increased more than 30-fold when treated with 500 nM TDP43 AON. A 500 nM treatment of a STMN2 parent oligonucleotide with SEQ ID NO: 237 reduced STMN2 transcript with cryptic exon levels by 96%. A 500 nM treatment of a STMN2 oligonucleotide variant with SEQ ID NO: 1348 reduced STMN2 transcript with cryptic exon levels by 97%. A 500 nM treatment of a STMN2 oligonucleotide variant with SEQ ID NO: 1349 reduced STMN2 transcript with cryptic exon levels by 97%. A 500 nM treatment of a STMN2 oligonucleotide variant with SEQ ID NO: 1360 reduced STMN2 transcript with cryptic exon levels by 71%.

[0501] Referring to FIG. 17B, STMN2-FL was decreased by 76% when treated with 500 nM TDP43 AON. A 500 nM treatment of a STMN2 parent oligonucleotide with SEQ ID NO: 237 increased STMN-FL levels by 238% (rescued to 81%). A 500 nM treatment of a STMN2 oligonucleotide variant with SEQ ID NO: 1348 increased STMN-FL levels by 63% (rescued to 39%). A 500 nM treatment of a STMN2 oligonucleotide variant with SEQ ID NO: 1359 increased STMN-FL levels by 96% (rescued to 47%). A 500 nM treatment of a STMN2 oligonucleotide variant with SEQ ID NO: 1360 increased STMN-FL levels by 125% (rescued to 54%).

[0502] Referring to FIG. 18A, the quantity of STMN2 transcript with cryptic exon was increased more than 19-fold when treated with 500 nM TDP43 AON. A 500 nM treatment of a STMN2 parent oligonucleotide with SEQ ID NO: 185 reduced STMN2 transcript with cryptic exon levels by 83%. A 500 nM treatment of a STMN2 oligonucleotide variant with SEQ ID NO: 1347 reduced STMN2 transcript with cryptic exon levels by 85%. A 500 nM treatment of a STMN2 oligonucleotide variant with SEQ ID NO: 1356 reduced STMN2 transcript with cryptic exon levels by 56%. A 500 nM treatment of a STMN2 oligonucleotide variant with SEQ ID NO: 1357 reduced STMN2 transcript with cryptic exon levels by 78%. A 500 nM treatment of a STMN2 oligonucleotide variant with SEQ ID NO: 1364 reduced STMN2 transcript with cryptic exon levels by 78%.

[0503] Referring to FIG. 18B, STMN2-FL was decreased by 82% when treated with 500 nM TDP43 AON. A 500 nM treatment of a STMN2 parent oligonucleotide with SEQ ID NO: 185 increased STMN-FL levels by 161% (rescued to 47%). A 500 nM treatment of a STMN2 oligonucleotide variant with SEQ ID NO: 1347 increased STMN-FL levels by 144% (rescued to 44%). A 500 nM treatment of a STMN2 oligonucleotide variant with SEQ ID NO: 1356 increased STMN-FL levels by 128% (rescued to 41%). A 500 nM treatment of a STMN2 oligonucleotide variant with SEQ ID NO: 1357 increased STMN-FL levels by 144% (rescued to 44%). A 500 nM treatment of a STMN2 oligonucleotide variant with SEQ ID NO: 1364 increased STMN-FL levels by 183% (rescued to 51%).

[0504] Referring to FIG. 19A, the quantity of STMN2 transcript with cryptic exon was increased more than 23-fold when treated with 500 nM TDP43 AON. A 500 nM treatment of a STMN2 parent oligonucleotide with SEQ ID NO: 173 reduced STMN2 transcript with cryptic exon levels by 81%. A 500 nM treatment of a STMN2 oligonucleotide variant with SEQ ID NO: 1345 reduced STMN2 transcript with cryptic exon levels by 86%. A 500 nM treatment of a STMN2 oligonucleotide variant with SEQ ID NO: 1354 reduced STMN2 transcript with cryptic exon levels by 81%. A 500 nM treatment of a STMN2 oligonucleotide variant with SEQ ID NO: 1355 reduced STMN2 transcript with cryptic exon levels by 47%. A 500 nM treatment of a STMN2 oligonucleotide variant with SEQ ID NO: 1362 reduced STMN2 transcript with cryptic exon levels by 75%.

[0505] Referring to FIG. 19B, STMN2-FL was decreased by 83% when treated with 500 nM TDP43 AON. A 500 nM treatment of a STMN2 parent oligonucleotide with SEQ ID NO: 173 increased STMN-FL levels by 265% (rescued to 62%). A 500 nM treatment of a STMN2 oligonucleotide variant with SEQ ID NO: 1345 increased STMN-FL levels by 206% (rescued to 52%). A 500 nM treatment of a STMN2 oligonucleotide variant with SEQ ID NO: 1354 increased STMN-FL levels by 212% (rescued to 53%). A 500 nM treatment of a STMN2 oligonucleotide variant with SEQ ID NO: 1355 increased STMN-FL levels by 88% (rescued to 32%). A 500 nM treatment of a STMN2 oligonucleotide variant with SEQ ID NO: 1362 increased STMN-FL levels by 188% (rescued to 49%).

[0506] Referring to FIG. 20A, the quantity of STMN2 transcript with cryptic exon was increased more than 35-fold when treated with 500 nM TDP43 AON. A 500 nM treatment of a STMN2 parent oligonucleotide with SEQ ID NO: 237 reduced STMN2 transcript with cryptic exon levels by 91%. A 500 nM treatment of a STMN2 oligonucleotide variant with SEQ ID NO: 1348 reduced STMN2 transcript with cryptic exon levels by 94%. A 500 nM treatment of a STMN2 oligonucleotide variant with SEQ ID NO: 1349 reduced STMN2 transcript with cryptic exon levels by 96%. A 500 nM treatment of a STMN2 oligonucleotide variant with SEQ ID NO: 1365 reduced STMN2 transcript with cryptic exon levels by 82%. A 500 nM treatment of a STMN2 oligonucleotide variant with SEQ ID NO: 1366 reduced STMN2 transcript with cryptic exon levels by 38%. A 500 nM treatment of a STMN2 oligonucleotide variant with SEQ ID NO: 1358 reduced STMN2 transcript with cryptic exon levels by 33%.

[0507] Referring to FIG. 20B, STMN2-FL was decreased by 80% when treated with 500 nM TDP43 AON. A 500 nM treatment of a STMN2 parent oligonucleotide with SEQ ID NO: 237 increased STMN-FL levels by 325% (rescued to 85%). A 500 nM treatment of a STMN2 oligonucleotide variant with SEQ ID NO: 1348 increased STMN-FL levels by 350% (rescued to 90%). A 500 nM treatment of a STMN2 oligonucleotide variant with SEQ ID NO: 1366 increased STMN-FL levels by 105% (rescued to 41%). A 500 nM treatment of a STMN2 oligonucleotide variant with SEQ ID NO: 1358 increased STMN-FL levels by 20% (rescued to 24%).

[0508] Referring to FIG. 21A, the quantity of STMN2 transcript with cryptic exon was increased more than 11-fold when treated with 500 nM TDP43 AON. A 500 nM treatment of a STMN2 parent oligonucleotide with SEQ ID NO: 173 reduced STMN2 transcript with cryptic exon levels by 72%. A 500 nM treatment of a STMN2 oligonucleotide variant with SEQ ID NO: 1346 reduced STMN2 transcript with cryptic exon levels by 85%. A 500 nM treatment of a STMN2 oligonucleotide variant with SEQ ID NO: 1353 reduced STMN2 transcript with cryptic exon levels by 55%. A 500 nM treatment of a STMN2 oligonucleotide variant with SEQ ID NO: 1662 (G*A*G*TCCTGCAATATGAATATA*AT*T*T, where * indicates phosphodiester linkage) reduced STMN2 transcript with cryptic exon levels by 49%. A 500 nM treatment of a STMN2 oligonucleotide variant with SEQ ID NO: 1663 (GAGTCCTG*C*A*A*T*A*TGAATATAATTT, where * indicates phosphodiester linkage) reduced STMN2 transcript with cryptic exon levels by 57%.

[0509] Referring to FIG. 21B, STMN2-FL was decreased by 73% when treated with 500 nM TDP43 AON. A 500 nM treatment of a STMN2 parent oligonucleotide with SEQ ID NO: 173 increased STMN-FL levels by 85% (rescued to 50%). A 500 nM treatment of a STMN2 oligonucleotide variant with SEQ ID NO: 1353 increased STMN-FL levels by 85% (rescued to 50%). A 500 nM treatment of a STMN2 oligonucleotide variant with SEQ ID NO: 1662 increased STMN-FL levels by 74% (rescued to 47%). A 500 nM treatment of a STMN2 oligonucleotide variant SEQ ID NO: 1663 increased STMN-FL levels by 89% (rescued to 51%).

[0510] Referring to FIG. 22A, the quantity of STMN2 transcript with cryptic exon was increased more than 13-fold when treated with 500 nM TDP43 AON. A 500 nM treatment of a STMN2 parent oligonucleotide with SEQ ID NO: 144 reduced STMN2 transcript with cryptic exon levels by 91%. A 500 nM treatment of a STMN2 oligonucleotide variant with SEQ ID NO: 1344 reduced STMN2 transcript with cryptic exon levels by 80%. A 500 nM treatment of a STMN2 oligonucleotide variant with SEQ ID NO: 1342 reduced STMN2 transcript with cryptic exon levels by 85%.

[0511] Referring to FIG. 22B, STMN2-FL was decreased by 65% when treated with 500 nM TDP43 AON. A 500 nM treatment of a STMN2 parent oligonucleotide with SEQ ID NO: 144 increased STMN-FL levels by 94% (rescued to 68%). A 500 nM treatment of a STMN2 parent oligonucleotide with SEQ ID NO: 1343 increased STMN-FL levels by 11% (rescued to 39%). A 500 nM treatment of a STMN2 parent oligonucleotide with SEQ ID NO: 1351 increased STMN-FL levels by 9% (rescued to 38%). A 500 nM treatment of a STMN2 oligonucleotide variant with SEQ ID NO: 1344 increased STMN-FL levels by 114% (rescued to 75%). A 500 nM treatment of a STMN2 parent oligonucleotide with SEQ ID NO: 1350 increased STMN-FL levels by 3% (rescued to 36%). A 500 nM treatment of a STMN2 parent oligonucleotide with SEQ ID NO: 1361 increased STMN-FL levels by 9% (rescued to 38%).

### Example 4: Neuropathy as an Indication that can be Targeted by a Stathmin-2 Cryptic Splicing Modulator

[0512] Experimentally, iCell human motor neurons (Cellular Dynamics International) were plated at 19,000 cells/well in a 96-well plate according to manufacturer's instructions. Neurons were treated with SEQ ID NO: 237 and endoporter (GeneTools, LLC.) or treated with endoporter alone in triplicate wells at day 7 post-plating. After 72 hours, SEQ ID NO: 237 STMN2 parent oligonucleotide and endoporter were washed out and MG132 added. After 18 hours, RNA was isolated, cDNA generated and multiplexed QPCR assay performed for STMN2 cryptic exon and reference GAPDH quantification.

[0513] Referring to FIG. 23, it illustrates a bar graph showing reversal of cryptic exon induction using SEQ ID NO: 237 STMN2 parent oligonucleotide even in view of increasing proteasome inhibition. As a control, cells that were treated with endoporter alone (no AON) and then subsequently treated with MG132 (across all concentrations of MG132) demonstrated high levels of cryptic exon. This is indicative of TDP-43 pathology induced by proteasome inhibition in human motor neurons. Mislocalization of TDP-43 leads to STMN2 mis-splicing and increased cryptic exon expression. The addition of SEQ ID NO: 237 parent oligonucleotide reverses cryptic exon induction with high potency (IC50<5 nM). As shown in FIG. 23, increasing concentrations of SEQ ID NO: 237 (ranging from 5 nM up to 500 nM) significantly reduces the cryptic exon relative quantity.

[0514] In totality, this data establishes that the SEQ ID NO: 237 parent oligonucleotide protects against proteotoxic stress induction of cryptic exon expression. This is applicable in settings where neurons are to be protected from proteotoxic stress present in neurodegenerative disorders.

### Example 5: Dose Response Restoration of Full Length STMN2 mRNA and STMN2 Protein Using Stathmin-2 Cryptic Splicing Modulator

[0515] The experiment was performed as previously described in human neuroblastoma SY5Y cells. The cells were plated in 6-well or 96-well plates and cultured to 80% confluency. TDP-43 expression in cells were knocked down using an AON to TDP43 to express the cryptic exon, thus preventing transcription of full-length STMN2 (STMN2-FL) product. Cells were additionally co-transfected with a STMN2 oligonucleotide variant (specifically, SEQ ID NO: 1348) at varying doses (5 nM, 50 nM, 100 nM, 200 nM, and 500 nM). RNA and protein were isolated for QPCR and western blot assays.

[0516] FIG. 24 shows the dose response curve illustrating increasing restoration of full length STMN2 transcript with increasing concentrations of STMN2 oligonucleotide variant with SEQ ID NO: 1348. Generally, increasing concentrations of the oligonucleotide increased full length STMN2 mRNA, decreased cryptic exon levels. Specifically, a 5 nM treatment of the STMN2 oligonucleotide variant resulted in −40% restoration of full length STMN2 transcript. A 500 nM treatment of the STMN2 oligonucleotide variant resulted in nearly 100% restoration of full length STMN2 transcript. Additionally, the 500 nM treatment of the STMN2 oligonucleotide variant resulted in the significant reduction (close to 0%) of cryptic exon.

[0517] FIG. 25A shows a protein blot assay demonstrating the qualitative increase of full length STMN2 protein in response to higher concentrations of STMN2 oligonucleotide variant with SEQ ID NO: 1348. FIG. 25B shows the quantitated levels of full length STMN2 protein normalized to GAPDH in response to different concentrations of STMN2 oligonucleotide variant. Generally, both FIGS. 25A and 25B show that increasing concentrations of the STMN2 oligonucleotide variant resulted in increasing concentrations of full length STMN2 protein. Specifically, as shown in FIG. 25B, lower concentrations (5 nM and 50 nM) of the STMN2 oligonucleotide variant resulted in full length STMN2 protein concentrations that were −60% of the control group (cell only). Notably, the 500 nM treatment of the STMN2 oligonucleotide variant resulted in nearly 100% restoration of the full length STMN2 protein (in comparison to the cell only control group).

### Example 6: STMN2 AONs with Spacer Technology Restore Full Length STMN2 and Reduces STMN2 Transcripts with a Cryptic Exon

[0518] STMN2 AONs with two or three spacers were developed. Here, a spacer is represented by Formula (I), wherein:

[chemical structure]

[0519] X is —O—; and

[0520] n is 1.

[0521] STMN2 AONs (e.g., STMN2 oligonucleotides each with two spacers) were tested in human motor neurons (hMN) for their ability to increase or restore full-length STMN2 mRNA (i.e., mRNA from which full-length STMN2 is translated) levels in TDP43 silenced cells. In some cases, STMN2 oligonucleotides are tested for their ability to reduce STMN2 transcripts with a cryptic exon. As described further below, the quantified percentage increase/restoration of STMN2-FL and/or percentage reduction of STMN2 transcripts with cryptic exon is described in reference to levels of STMN-FL and/or STMN2 transcripts with cryptic exon in a control group (e.g., cells treated with 500 nM TDP43 AON).

[0522] Three different STMN2 oligonucleotides with two spacers were generated. These three example STMN2 oligonucleotides are named 1) SEQ ID NO: 1589 (a 25mer with a first spacer at position 11 and a second spacer at position 22), 2) SEQ ID NO: 1590 (a 25mer with a first spacer at position 7 and a second spacer at position 14), and 3) SEQ ID NO: 1591 (a 25mer with a first spacer at position 8 and a second spacer at position 19). The STMN2 AONs are shown in Table 11.

TABLE 11
STMN2 AONs (including STMN2 parent
oligonucleotides and STMN2
oligonucleotides with two spacers)

| Sequence | |
|---|---|
| ID | |
| Number | Sequence (where S indicates |
| (SEQ ID | presence of a Spacer) |
| NO) | (5′ → 3′) |
| 144 | AATCCAATTAAGAGAGAGTGATGGG |
| 1589 | AATCCAATTASGAGAGAGTGASGGG |
| 173 | GAGTCCTGCAATATGAATATAATTT |
| 1590 | GAGTCCSGCAATASGAATATAATTT |
| 237 | GCACACATGCTCACACAGAGAGCCA |
| 1591 | GCACACASGCTCACACAGSGAGCCA |

[0523] Referring to FIG. 26A, the quantity of STMN2 transcript with cryptic exon was increased more than 27-fold when treated with 500 nM TDP43 AON. A 500 nM treatment of a STMN2 parent oligonucleotide with SEQ ID NO: 144 reduced STMN2 transcript with cryptic exon levels by 71%. A 500 nM treatment of a STMN2 AON with SEQ ID NO: 1589 reduced STMN2 transcript with cryptic exon levels by 88%. Here, SEQ ID NO: 1589 exhibited further reduction of STMN2 transcripts with cryptic exon in comparison to SEQ ID NO: 144 (without two spacers.) A 500 nM treatment of a STMN2 parent oligonucleotide with SEQ ID NO: 173 reduced STMN2 transcript with cryptic exon levels by 77%. A 500 nM treatment of a STMN2 AON with SEQ ID NO: 1590 reduced STMN2 transcript with cryptic exon levels by 48%. A 500 nM treatment of a STMN2 parent oligonucleotide with SEQ ID NO: 237 reduced STMN2 transcript with cryptic exon levels by 93%. A 500 nM treatment of a STMN2 AON with SEQ ID NO: 1591 reduced STMN2 transcript with cryptic exon levels by 96%. Here, SEQ ID NO: 1591 exhibited similar reduction of STMN2 transcripts with cryptic exon in comparison to SEQ ID NO: 237 (without two spacers.)

[0524] Referring to FIG. 26B, STMN2-FL was decreased by 68% when treated with 500 nM TDP43 AON. A 500 nM treatment of a STMN2 parent oligonucleotide with SEQ ID NO: 144 increased STMN-FL levels by 165% (rescued to 85%). A 500 nM treatment of a STMN2 AON with SEQ ID NO: 1589 increased STMN-FL levels by 256% (rescued to 114%). Here, SEQ ID NO: 1589 exhibited improved restoration of STMN2 FL mRNA in comparison to SEQ ID NO: 144 (without two spacers.) A 500 nM treatment of a STMN2 parent oligonucleotide with SEQ ID NO: 173 increased STMN-FL levels by 184% (rescued to 91%). A 500 nM treatment of a STMN2 AON with SEQ ID NO: 1590 increased STMN-FL levels by 156% (rescued to 82%). Here, SEQ ID NO: 1590 exhibited similar restoration of STMN2 FL mRNA in comparison to SEQ ID NO: 173 (without two spacers.) A 500 nM treatment of a STMN2 parent oligonucleotide with SEQ ID NO: 237 increased STMN-FL levels by 225% (rescued to 104%). A 500 nM treatment of a STMN2 AON with SEQ ID NO: 1591 increased STMN-FL levels by 225% (rescued to 104%). Here, SEQ ID NO: 1591 exhibited similar restoration of STMN2 FL mRNA in comparison to SEQ ID NO: 237 (without two spacers.).

[0525] Additional example STMN2 AONs (including STMN2 AONs described above in Table 11) are shown below in Table 12. Specifically, Table 12 includes example STMN2 AONs with two spacers and STMN2 AONs with three spacers. Furthermore, Table 12 includes example STMN2 AON variants with one or more spacers that are shorter in length (e.g., 23mer, 21mer or 19mer) in comparison to STMN2 parent oligonucleotides described above in Table 11.

TABLE 12
STMN2 AONs with two or three spacers and
STMN2 AON variants with two spacers.

| Sequence | |
|---|---|
| ID | |
| Number | Sequence (where S indicates |
| (SEQ ID | presence of a |
| NO). | Spacer) (5’ → 3’) |
| 144 | AATCCAATTAAGAGAGAGTGATGGG |
| 1589 | AATCCAATTASGAGAGAGTGASGGG |
| 1592 | AATCCAASTAAGAGASAGTGATGSG |
| 1593 | AATCCAASTAAGAGASAGTGATSGG |
| 1594 | ASTCCAATTSAGAGAGASTGATGGG |
| 1417 | AATCCSATTASGAGAGAGSGATGGG |
| 1595 | TCCAATTSAGAGAGASTGATGGG |
| 173 | GAGTCCTGCAATATGAATATAATTT |
| 1590 | GAGTCCSGCAATASGAATATAATTT |
| 1596 | GAGTCCTSCAATATGSATATAATST |
| 1597 | GAGSCCTGCAASATGAATSTAATTT |
| 1418 | GAGTCCSGCAATASGAATATASTTT |
| 1598 | GTCCTGCSATATGAASATAAT |
| 1599 | GTCCTSCAATATGSATATAAT |
| 1419 | GTCCSGCAATASGAATATA |
| 237 | GCACACATGCTCACACAGAGAGCCA |
| 1591 | GCACACASGCTCACACAGSGAGCCA |
| 1600 | GCACACASGCTCACASAGAGAGSCA |
| 1601 | GCSCACATGSTCACACASAGAGCCA |
| 1420 | GCACACASGCTCACASAGAGSGCCA |
| 1602 | GCACACASGCTCACASAGAGAGC |
| 1603 | AATSCAATTAAGAGSGAGTGATGGG |
| 1604 | AATCCAATTASGAGAGAGTGSTGGG |
| 1605 | AATCCASTTAAGAGAGAGSGATGGG |
| 1606 | AATCCASTTAAGAGAGASTGATGGG |
| 1607 | AATCCAASTAAGSGAGASTGATGGG |
| 1608 | GAGSCCTGCAATATSAATATAATTT |
| 1609 | GAGTCCTGCASTATGAATATSATTT |
| 1610 | GAGTCCSGCAATATGAATSTAATTT |
| 1611 | GAGTCCSGCAATATGAASATAATTT |
| 1612 | GAGTCCTSCAATSTGAASATAATTT |
| 1613 | GAGTCCSGCAATSTGAATSTAATTT |
| 1614 | GAGTCSTGCAATSTGAATASAATTT |
| 1615 | GAGTSCTGCAATSTGAATATSATTT |
| 1616 | GTCCTGCSATATGSATATAAT |
| 1617 | CCTTTCTCSCGAAGGTCTTCSGCCG |
| 1618 | CTTTCTCSCGAAGGTSTTCTGCC |
| 1619 | TTTCTCTSGAAGGTCSTCTGCCG |
| 1664 | GCACACASGCSCACACAGSGAGCCA |
| 1621 | GCACACASGCTCSCACASAGAGCCA |

[0526] Table 13 depicts the performance of STMN2 AONs, including STMN2 AONs with two or three spacers.

[0527] STMN2 AONs that included two spacers increased levels of STMN2-FL. For example, at a dose of 200 nM ASO, SEQ ID NO: 1608 and SEQ ID NO: 1609 increased levels of STMN-FL to 0.65 and 0.78, respectively. Additionally, at a dose of 200 nM ASO, SEQ ID NO: 1610 and SEQ ID NO: 1611 increased levels of STMN-FL to 0.95 and 1.09, respectively. Notably, a number of STMN2 AONs increased levels of STMN-FL to a lesser extent. Specifically, at a 200 nM dose of STMN2 AON, SEQ ID NO: 1612, SEQ ID NO: 1613, SEQ ID NO: 1614, and SEQ ID NO: 1615 increased levels of STMN-FL to between 0.10 and 0.20.

[0528] At a dose of 200 nM AON, all STMN2 AON derived from SEQ ID NO: 197 significantly increased levels of STMN-FL. Specifically, SEQ ID NO: 1617, SEQ ID NO: 1618, and SEQ ID NO: 1619 increased levels of STMN-FL to 0.99, 0.94, and 1.00, respectively.

[0529] Altogether, these results demonstrate that different STMN2 AONs including two spacers are capable of increasing STMN-FL to levels that are close or comparable to their non-spacer counterparts (e.g., SEQ ID NO: 173 or SEQ ID NO: 197).

[0530] The differences in performance between STMN2 AONs derived from SEQ ID NO: 173, including SEQ ID NO: 1612, SEQ ID NO: 1613, SEQ ID NO: 1614, and SEQ ID NO: 1615 and STMN2 AONs derived from SEQ ID NO: 197 including SEQ ID NO: 1617, SEQ ID NO: 1618, and SEQ ID NO: 1619 may be attributable to GC content in the respective STMN2 AONs. Specifically, as shown in Table 13, STMN2 AONs derived from SEQ ID NO: 173 had below 30% GC content, which may lead to their reduced performance. In contrast, as shown in Table 13, STMN2 AONs derived from SEQ ID NO: 197 had above 40% GC content. Thus, including two or more spacers in a higher GC content AON may be preferable.

[0531] In addition to GC content, the location of spacers relative to guanine and cytosine nucleobases can also impact the performance of the STMN2 AON. For example, at a 200 nM AON dose, SEQ ID NO: 1615, SEQ ID NO: 1596, and SEQ ID NO: 1597 increased levels of STMN2-FL to 0.12, 0.26, and 0.29. Each of these STMN2 AONs have three spacers. In comparison, at a 200 nM AON dose, SEQ ID NO: 1418 increased levels of STMN2-FL to 0.73. SEQ ID NO: 1418 includes spacers that are positioned to maximize the number of spacers that are immediately preceding a guanine base. Specifically, the first and second spacers of SEQ ID NO: 1418 each respectively precede a guanine base. Thus, maximizing the number of spacers in a STMN2 AON that immediately precede a guanine base can improve the performance of the STMN2 AON.

TABLE 13
Performance of varying STMN2 AONs, including
STMN2 AONs with two or three spacers.

| | | Rela- | Rela- | |
|---|---|---|---|---|
| | | tive | tive | |
| | | Quan- | Quan- | |
| | | tity | tity | |
| | | of | of | |
| | | STMN- | STMN- | |
| Se- | | FL in | FL in | |
| quence | | re- | re- | |
| ID | | sponse | sponse | |
| No. | Sequence (where | to 200 | to 50 | |
| (SEQ | S indicates | nM ASO | nM ASO | GC |
| ID | presence of a | Treat- | treat- | con- |
| NO) | Spacer) (5′ → 3′) | ment | ment | tent |
| 169 | CCTGCAATATGAATATAATTTTAAA | 0.73 | 0.45 | 20% |
| 1421 | CCTGCAATATGAATATAATTTTA | 1.19 | 0.48 | 22% |
| 1422 | TGCAATATGAATATAATTTTAAA | 0.85 | 0.63 | 13% |
| 1423 | CTGCAATATGAATATAATTTTAA | 0.93 | 0.69 | 17% |
| 1424 | TGCAATATGAATATAATTTTA | 0.8 | 0.44 | 14% |
| 170 | TCCTGCAATATGAATATAATTTTAA | 1.01 | 0.46 | 20% |
| 1425 | TCCTGCAATATGAATATAATTTT | 0.83 | 0.49 | 22% |
| 1426 | CTGCAATATGAATATAATTTT | 0.83 | 0.57 | 19% |
| 171 | GTCCTGCAATATGAATATAATTTTA | 0.89 | 0.41 | 24% |
| 1346 | GTCCTGCAATATGAATATAATTT | 1.1 | 1.13 | 26% |
| 1355 | CCTGCAATATGAATATAATTT | 0.82 | 0.44 | 24% |
| 172 | AGTCCTGCAATATGAATATAATTTT | 0.79 | 0.45 | 24% |
| 1427 | AGTCCTGCAATATGAATATAATT | 0.89 | 0.52 | 26% |
| 1428 | TCCTGCAATATGAATATAATT | 1.18 | 0.66 | 24% |
| 252 | CTCTCTCGCACACACGCACACATGC | 0.67 | 0.43 | 60% |
| 1432 | CTCTCGCACACACGCACACATGC | 0.67 | 0.52 | 61% |
| 1433 | CTCTCTCGCACACACGCACACAT | 0.63 | 0.24 | 57% |
| 1434 | TCTCTCGCACACACGCACACATG | 0.73 | 0.45 | 57% |
| 1435 | CTCTCGCACACACGCACACAT | 0.84 | 0.36 | 57% |
| 173 | GAGTCCTGCAATATGAATATAATTT | 1.12 | 0.6 | 28% |
| 1608 | GAGSCCTGCAATATSAATATAATTT | 0.65 | 0.19 | 24% |
| 1609 | GAGTCCTGCASTATGAATATSATTT | 0.78 | 0.25 | 28% |
| 1610 | GAGTCCSGCAATATGAATSTAATTT | 0.95 | 0.43 | 28% |
| 1611 | GAGTCCSGCAATATGAASATAATTT | 1.09 | 0.32 | 28% |
| 1612 | GAGTCCTSCAATSTGAASATAATTT | 0.15 | 0.08 | 24% |
| 1613 | GAGTCCSGCAATSTGAATSTAATTT | 0.2 | 0.13 | 28% |
| 1614 | GAGTCSTGCAATSTGAATASAATTT | 0.13 | 0.18 | 24% |
| 1615 | GAGTSCTGCAATSTGAATATSATTT | 0.12 | 0.12 | 24% |
| 1596 | GAGTCCTSCAATATGSATATAATST | 0.26 | 0.13 | 24% |
| 1597 | GAGSCCTGCAASATGAATSTAATTT | 0.29 | 0.17 | 28% |
| 1418 | GAGTCCSGCAATASGAATATASTTT | 0.73 | 0.24 | 28% |
| 1598 | GTCCTGCSATATGAASATAAT | 0.72 | 0.31 | 29% |
| 1599 | GTCCTSCAATATGSATATAAT | 0.1 | 0.16 | 24% |
| 1616 | GTCCTGCSATATGSATATAAT | 0.77 | 0.23 | 29% |
| 197 | CCTTTCTCTCGAAGGTCTTCTGCCG | 1.04 | 0.44 | 56% |
| 1429 | TTTCTCTCGAAGGTCTTCTGCCG | 1.35 | 1.06 | 48% |
| 1430 | CCTTTCTCTCGAAGGTCTTCTGC | 0.98 | 0.44 | 48% |
| 1431 | CTTTCTCTCGAAGGTCTTCTGCC | 1.33 | 0.55 | 48% |
| 1617 | CCTTTCTCSCGAAGGTCTTCSGCCG | 0.99 | 0.69 | 56% |
| 1618 | CTTTCTCSCGAAGGTSTTCTGCC | 0.94 | 0.58 | 48% |
| 1619 | TTTCTCTSGAAGGTCSTCTGCCG | 1 | 0.54 | 48% |

### Example 7: Additional Experiments Demonstrate STMN2 AONs with Spacer Technology Restore Full Length STMN2 and Reduces STMN2 Transcripts with a Cryptic Exon

[0532] STMN2 AONs with one, two, or three spacers were developed. Generally, in this Example, except for SEQ ID NO: 1649 described below, a spacer is represented by Formula (I), wherein:

[chemical structure]

[0533] X is —O—, and

[0534] n is 1.

For SEQ ID NO: 1649, each spacer included in the ASO is represented by Formula (I), wherein:

[chemical structure]

[0535] X is —O—, and

[0536] n is 2.

[0537] STMN2 AONs with spacers were characterized and compared to STMN2 AON without spacer counterparts. Specifically, the melting temperature of STMN2 AON with and without spacers were determined to demonstrate the structural differences of the STMN2 AONs. Table 14 shows the different melting temperatures of STMN2 AONs across two different replicates. STMN2 AONs with two spacers exhibited a lower melting temperature (approximately 10° C. lower) in comparison to STMN2 AONs without spacers.

TABLE 14
Melting temperatures of STMN2 AONs with and without spacers.

| ASO + RNA | Tm (° C.) | Tm (° C.) | ΔTm ° C. | ΔTm ° C. | |
|---|---|---|---|---|---|
| target (25bases) | Replicate 1 | Replicate 2 | Replicate 1 | Replicate 2 | % GC |
| SEQ ID NO: 237 | 86.6 | 86.5 | 11.6 | 11.4 | 56 |
| (no spacer) | | | | | |
| SEQ ID NO: 1591 | 75.0 | 75.1 | | | |
| (2 spacers) | | | | | |
| SEQ ID NO: 144 | 75.5 | 75.5 | 9.5 | 9.7 | 40 |
| (no spacer) | | | | | |
| SEQ ID NO: 1589 | 66.0 | 65.8 | | | |
| (2 spacers) | | | | | |
| SEQ ID NO: 173 | 71.2 | 71.1 | 13.5 | 13.5 | 28 |
| (no spacer) | | | | | |
| SEQ ID NO: 1590 | 57.7 | 57.6 | | | |
| (2 spacers) | | | | | |

[0538] STMN2 AONs (e.g., STMN2 oligonucleotides with one, two, or three spacers) were tested for their ability to increase or restore full-length STMN2 mRNA (i.e., mRNA from which full-length STMN2 is translated) levels in TDP43 silenced cells. In some cases, STMN2 oligonucleotides are tested for their ability to reduce STMN2 transcripts with a cryptic exon. FIGS. 27-35 show effects of STMN2 AONs with spacers in increasing full-length STMN2 mRNA (“STMN2 FL”) and/or in reducing STMN2 transcripts with a cryptic exon (“STMN2 cryptic”). Furthermore, Table 15 identifies the respective STMN2 AONs as well as their respective performances. Treatment groups are identified on the X-axis of FIGS. 27-35 and include the concentration of specific AON sequences. Here, specific AON sequences are labeled according to their corresponding SEQ ID NO.

[0539] FIG. 27A is a bar graph showing the results of RT-qPCR analysis of STMN2 transcript with cryptic exon mRNA levels in the presence of TDP43 antisense, and reduction of the STMN2 transcript with cryptic exon mRNA levels across different dosages of STMN2 AONs including SEQ ID NO: 173, SEQ ID NO: 1608, SEQ ID NO: 1609, SEQ ID NO: 1610, SEQ ID NO: 1611, SEQ ID NO: 1612, SEQ ID NO: 1613, SEQ ID NO: 1614, SEQ ID NO: 1615, SEQ ID NO: 1596, SEQ ID NO: 1597, and SEQ ID NO: 1418. FIG. 27B is a bar graph showing the results of RT-qPCR analysis of STMN2 full-length mRNA levels in the presence of TDP43 antisense, and restoration of the full-length STMN2 transcript across different dosages of STMN2 AONs including SEQ ID NO: 173, SEQ ID NO: 1608, SEQ ID NO: 1609, SEQ ID NO: 1610, SEQ ID NO: 1611, SEQ ID NO: 1612, SEQ ID NO: 1613, SEQ ID NO: 1614, SEQ ID NO: 1615, SEQ ID NO: 1596, SEQ ID NO: 1597, and SEQ ID NO: 1418. Generally, FIGS. 27A and 27B demonstrate the performance of STMN2 AONs with spacers (e.g., SEQ ID NO: 1608, SEQ ID NO: 1609, SEQ ID NO: 1610, SEQ ID NO: 1611, SEQ ID NO: 1612, SEQ ID NO: 1613, SEQ ID NO: 1614, SEQ ID NO: 1615, SEQ ID NO: 1596, SEQ ID NO: 1597, and SEQ ID NO: 1418) in comparison to STMN2 AON without spacers (SEQ ID NO: 173). Here, a number of STMN2 AON with spacers perform as well, or outperform the STMN2 AON without spacers (SEQ ID NO: 173). Specifically, 200 nM of SEQ ID NO: 1609, SEQ ID NO: 1610, and SEQ ID NO: 1611 achieve comparable levels of STMN2 transcript with cryptic exon mRNA levels and STMN2 full-length mRNA levels in the presence of TDP43 in comparison to STMN2 AON without spacers (SEQ ID NO: 173).

[0540] FIG. 28A is a bar graph showing the results of RT-qPCR analysis of STMN2 transcript with cryptic exon mRNA levels in the presence of TDP43 antisense, and reduction of the STMN2 transcript with cryptic exon mRNA levels across different dosages of STMN2 AONs including SEQ ID NO: 173, SEQ ID NO: 1632, SEQ ID NO: 1346, SEQ ID NO: 1631, SEQ ID NO: 1353, and SEQ ID NO: 1598. FIG. 28B is a bar graph showing the results of RT-qPCR analysis of STMN2 full-length mRNA levels in the presence of TDP43 antisense, and restoration of the full-length STMN2 transcript across different dosages of STMN2 AONs including SEQ ID NO: 173, SEQ ID NO: 1632, SEQ ID NO: 1346, SEQ ID NO: 1631, SEQ ID NO: 1353, and SEQ ID NO: 1598. Generally, FIGS. 28A and 28B demonstrate the performance of STMN2 AONs with spacers (e.g., SEQ ID NO: 1632, SEQ ID NO: 1631, and SEQ ID NO: 1598) in comparison to their STMN2 AON counterparts without spacer (e.g., SEQ ID NO: 173, SEQ ID NO: 1346, and SEQ ID NO: 1353). Here, a 50 nM or 200 nM dose of SEQ ID NO: 1632 achieves comparable levels of STMN2 transcript with cryptic exon mRNA levels and STMN2 full-length mRNA levels in the presence of TDP43 in comparison to a 50 nM or 200 nM dose of the STMN2 AON counterpart without spacers (SEQ ID NO: 173). A 200 nM dose of SEQ ID NO: 1631 achieves comparable levels of STMN2 full-length mRNA levels in the presence of TDP43 in comparison to 200 nM dose of the STMN2 AON counterpart without spacers (SEQ ID NO: 1346).

[0541] FIG. 29A is a bar graph showing the results of RT-qPCR analysis of STMN2 transcript with cryptic exon mRNA levels in the presence of TDP43 antisense, and reduction of the STMN2 transcript with cryptic exon mRNA levels across different dosages of STMN2 AONs including SEQ ID NO: 173 and SEQ ID NO: 1610. FIG. 29B is a bar graph showing the results of RT-qPCR analysis of STMN2 full-length mRNA levels in the presence of TDP43 antisense, and restoration of the full-length STMN2 transcript across different dosages of STMN2 AONs including SEQ ID NO: 173 and SEQ ID NO: 1610. Generally, FIGS. 29A and 29B demonstrate the performance of STMN2 AONs with spacers (e.g., SEQ ID NO: 1610) in comparison to the STMN2 AON counterpart without spacers (e.g., SEQ ID NO: 173). Across the different doses (e.g., 500 nM, 200 nM, 50 nM, 20 nM, and 5 nM), SEQ ID NO: 1610 achieves comparable levels of STMN2 transcript with cryptic exon mRNA levels and STMN2 full-length mRNA levels in the presence of TDP43 in comparison to the STMN2 AON counterpart without spacers (SEQ ID NO: 173).

[0542] FIG. 30A is a bar graph showing the results of RT-qPCR analysis of STMN2 transcript with cryptic exon mRNA levels in the presence of TDP43 antisense, and reduction of the STMN2 transcript with cryptic exon mRNA levels across different dosages of STMN2 AONs including SEQ ID NO: 185 and SEQ ID NO: 1635. FIG. 30B is a bar graph showing the results of RT-qPCR analysis of STMN2 full-length mRNA levels in the presence of TDP43 antisense, and restoration of the full-length STMN2 transcript across different dosages of STMN2 AONs including SEQ ID NO: 185 and SEQ ID NO: 1635. Generally, FIGS. 30A and 30B demonstrate the performance of STMN2 AONs with spacers (e.g., SEQ ID NO: 1635) in comparison to the STMN2 AON counterpart without spacers (e.g., SEQ ID NO: 185). Across the different doses (e.g., 500 nM, 200 nM, 50 nM, 20 nM, and 5 nM), SEQ ID NO: 1610 achieves comparable or reduced levels of STMN2 transcript with cryptic exon mRNA levels and comparable or increased STMN2 full-length mRNA levels in the presence of TDP43 in comparison to the STMN2 AON counterpart without spacers (SEQ ID NO: 185).

[0543] FIG. 31A is a bar graph showing the results of RT-qPCR analysis of STMN2 transcript with cryptic exon mRNA levels in the presence of TDP43 antisense, and reduction of the STMN2 transcript with cryptic exon mRNA levels across different dosages of STMN2 AONs including SEQ ID NO: 1347, SEQ ID NO: 1633, and SEQ ID NO: 1634. FIG. 31B is a bar graph showing the results of RT-qPCR analysis of STMN2 full-length mRNA levels in the presence of TDP43 antisense, and restoration of the full-length STMN2 transcript across different dosages of STMN2 AONs including SEQ ID NO: 1347, SEQ ID NO: 1633, and SEQ ID NO: 1634. Generally, FIGS. 31A and 31B demonstrate the performance of STMN2 AONs with spacers (e.g., SEQ ID NO: 1633 and SEQ ID NO: 1634) in comparison to the STMN2 AON counterpart without spacers (e.g., SEQ ID NO: 1347). Across the different doses (e.g., 500 nM, 200 nM, 50 nM, 20 nM, and 5 nM), SEQ ID NO: 1633 achieves comparable or reduced levels of STMN2 transcript with cryptic exon mRNA levels and comparable or increased STMN2 full-length mRNA levels in the presence of TDP43 in comparison to the STMN2 AON counterpart without spacers (SEQ ID NO: 1347). Similarly, across the different doses (e.g., 500 nM, 200 nM, 50 nM, 20 nM, and 5 nM), SEQ ID NO: 1634 achieves comparable or reduced levels of STMN2 transcript with cryptic exon mRNA levels and comparable or increased STMN2 full-length mRNA levels in the presence of TDP43 in comparison to the STMN2 AON counterpart without spacers (SEQ ID NO: 1347).

[0544] FIG. 32A is a bar graph showing the results of RT-qPCR analysis of STMN2 transcript with cryptic exon mRNA levels in the presence of TDP43 antisense, and reduction of the STMN2 transcript with cryptic exon mRNA levels across different dosages of STMN2 AONs including SEQ ID NO: 197, SEQ ID NO: 1617, SEQ ID NO: 1618, and SEQ ID NO: 1619. FIG. 32B is a bar graph showing the results of RT-qPCR analysis of STMN2 full-length mRNA levels in the presence of TDP43 antisense, and restoration of the full-length STMN2 transcript across different dosages of STMN2 AONs including SEQ ID NO: 197, SEQ ID NO: 1617, SEQ ID NO: 1618, and SEQ ID NO: 1619. Generally, FIGS. 32A and 32B demonstrate the performance of STMN2 AONs with spacers (e.g., SEQ ID NO: 1617, SEQ ID NO: 1618, and SEQ ID NO: 1619) in comparison to the STMN2 AON counterpart without spacers (e.g., SEQ ID NO: 197). At a 50 nM or 200 nM dose, SEQ ID NO: 1617 achieves comparable or reduced levels of STMN2 transcript with cryptic exon mRNA levels and comparable or increased STMN2 full-length mRNA levels in the presence of TDP43 in comparison to a 50 nM or 200 nM dose of the STMN2 AON counterpart without spacers (SEQ ID NO: 197). At a 50 nM or 200 nM dose, SEQ ID NO: 1618 achieves comparable or reduced levels of STMN2 transcript with cryptic exon mRNA levels and comparable or increased STMN2 full-length mRNA levels in the presence of TDP43 in comparison to a 50 nM or 200 nM dose of the STMN2 AON counterpart without spacers (SEQ ID NO: 197). At a 50 nM or 200 nM dose, SEQ ID NO: 1619 achieves comparable or reduced levels of STMN2 transcript with cryptic exon mRNA levels and comparable or increased STMN2 full-length mRNA levels in the presence of TDP43 in comparison to a 50 nM or 200 nM dose of the STMN2 AON counterpart without spacers (SEQ ID NO: 197).

[0545] FIG. 33A is a bar graph showing the results of RT-qPCR analysis of STMN2 transcript with cryptic exon mRNA levels in the presence of TDP43 antisense, and reduction of the STMN2 transcript with cryptic exon mRNA levels across different dosages of STMN2 AONs including SEQ ID NO: 252, SEQ ID NO: 1650, SEQ ID NO: 1434, SEQ ID NO: 1651, and SEQ ID NO: 1620. FIG. 33B is a bar graph showing the results of RT-qPCR analysis of STMN2 full-length mRNA levels in the presence of TDP43 antisense, and restoration of the full-length STMN2 transcript across different dosages of STMN2 AONs including SEQ ID NO: 252, SEQ ID NO: 1650, SEQ ID NO: 1434, SEQ ID NO: 1651, and SEQ ID NO: 1620. Generally, FIGS. 33A and 33B demonstrate the performance of STMN2 AONs with spacers (e.g., SEQ ID NO: 1620) in comparison to the STMN2 AON counterpart without spacers (e.g., SEQ ID NO: 252, SEQ ID NO: 1650, SEQ ID NO: 1434, and SEQ ID NO: 1651). Ata 50 nM or 200 nM dose, SEQ ID NO: 1620 achieves comparable or reduced levels of STMN2 transcript with cryptic exon mRNA levels and comparable or increased STMN2 full-length mRNA levels in the presence of TDP43 in comparison to a 50 nM or 200 nM dose of the STMN2 AON counterparts without spacers (SEQ ID NO: 252, SEQ ID NO: 1650, SEQ ID NO: 1434, and SEQ ID NO: 1651).

[0546] FIG. 34A is a bar graph showing the results of RT-qPCR analysis of STMN2 transcript with cryptic exon mRNA levels in the presence of TDP43 antisense, and reduction of the STMN2 transcript with cryptic exon mRNA levels across different dosages of STMN2 AONs including SEQ ID NO: 1434 and SEQ ID NO: 1620. FIG. 34B is a bar graph showing the results of RT-qPCR analysis of STMN2 full-length mRNA levels in the presence of TDP43 antisense, and restoration of the full-length STMN2 transcript across different dosages of STMN2 AONs including SEQ ID NO: 1434 and SEQ ID NO: 1620. Generally, FIGS. 34A and 34B demonstrate the performance of STMN2 AONs with spacers (e.g., SEQ ID NO: 1620) in comparison to the STMN2 AON counterpart without spacers (e.g., SEQ ID NO: 1434). Across the different doses (e.g., 500 nM, 200 nM, 50 nM, 20 nM, and 5 nM), SEQ ID NO: 1620 achieves reduced levels of STMN2 transcript with cryptic exon mRNA levels and increased STMN2 full-length mRNA levels in the presence of TDP43 in comparison to the STMN2 AON counterpart without spacers (SEQ ID NO: 1434).

[0547] FIG. 35 is a bar graph showing normalized STMN2 protein levels following treatment with TDP43 antisense and restoration using 500 nM STMN2 AONs including SEQ ID NO: 144, SEQ ID NO: 1589, SEQ ID NO: 173, SEQ ID NO: 1616, SEQ ID NO: 237, and SEQ ID NO: 1591. Generally, FIG. 35 demonstrates the performance of STMN2 AONs with spacers (e.g., SEQ ID NO: 1589, SEQ ID NO: 1616, and SEQ ID NO: 1591) in comparison to their STMN2 AON counterparts without spacers (e.g., SEQ ID NO: 144, SEQ ID NO: 173, SEQ ID NO: 237). Generally, STMN2 AONs with spacers are able to achieve comparable levels of STMN2 protein levels in comparison to their STMN2 AON counterparts. Specifically, SEQ ID NO: 1589 achieves comparable levels of STMN2 protein levels in comparison to SEQ ID NO: 144. SEQ ID NO: 1616 achieves comparable levels of STMN2 protein levels in comparison to SEQ ID NO: 173. SEQ ID NO: 1591 achieves comparable levels of STMN2 protein levels in comparison to SEQ ID NO: 237.

[0548] Referring to Tables 15 and 17, they show the performance of STMN2 AONs with spacers (e.g., Table 15) and performance of STMN2 AONs without spacers (e.g., Table 16) in human motor neurons. RT-qPCR results for STMN2 full-length transcript provided in Tables 15 and 17 are normalized values using the equation ((RQASO-RQTDP43)/(Rqendo-RQTDP43))*100 where RQ refers to Relative Quantity described above. RT-qPCR results for STMN2 transcript with a cryptic exon provided in Tables 15 and 17 are normalized values using the equation (1-((RQASO-RQTDP43)/(Rqendo-RQTDP43)))*100 where RQ refers to Relative Quantity described above. Each RT-qPCR experiment was run in triplicate wells and performed N number of independent replicate runs. Standard deviation or SD is calculated as the SD between each run. Where N=1, SD was reported as the standard deviation between the triplicate well results in the single experiment. Notably, as shown in Table 15, a 200 nM dose of SEQ ID NO: 1631 (GTCCTGCSATATGAASATAATTT with two spacers) rescued full length STMN2 mRNA to 69% and reduced STMN2 transcript with cryptic exon levels to 49% (reduced by 51%).

[0549] Additionally, as shown in Table 15, a 200 nM dose of SEQ ID NO: 1633 (GTCTTCTSCCGAGTCSTGCAATA with two spacers) rescued full length STMN2 mRNA to 83% and reduced STMN2 transcript with cryptic exon levels to 10% (reduced by 90%). Comparatively, as shown in Table 16, a 200 nM dose of SEQ ID NO: 1347 (GTCTTCTGCCGAGTCCTGCAATA with no spacers) rescued full length STMN2 mRNA to 40.2% and reduced STMN2 transcript with cryptic exon levels to 20.8% (reduced by 80.2%). This indicates that the addition of spacers improves the performance of SEQ ID NO: 1633 in comparison to the STMN2 AON counterpart without spacers (e.g., SEQ ID NO: 1347).

[0550] Additionally, as shown in Table 15, a 200 nM dose of SEQ ID NO: 1618 (CTTTCTCSCGAAGGTSTTCTGCC with two spacers) rescued full length STMN2 mRNA to 82% and reduced STMN2 transcript with cryptic exon levels to 11% (reduced by 89%). A 200 nM dose of SEQ ID NO: 1619 (TTTCTCTSGAAGGTCSTCTGCCG with two spacers) rescued full length STMN2 mRNA to 80% and reduced STMN2 transcript with cryptic exon levels to 12% (reduced by 88%). Comparatively, as shown in Table 16, a 200 nM dose of SEQ ID NO: 197 (CCTTTCTCTCGAAGGTCTTCTGCCG with no spacers) rescued full length STMN2 mRNA to 79.3% and reduced STMN2 transcript with cryptic exon levels to 12.1% (reduced by 87.9%). Here, at 200 nM dose, the performance of STMN2 AONs with two spacers (e.g., SEQ ID NO: 1618 and SEQ ID NO: 1619) is comparable to the STMN2 AON counterpart without spacers (e.g., SEQ ID NO: 197). Notably, at a 50 nM dose, the performance of STMN2 AONs with two spacers (e.g., SEQ ID NO: 1618 and SEQ ID NO: 1619) is improve din comparison to the STMN2 AON counterpart without spacers (e.g., SEQ ID NO: 197). Specifically, at the 50 nM dose, SEQ ID NO: 1618 rescued full length STMN2 mRNA to 46% and SEQ ID NO: 1619 rescued full length STMN2 mRNA to 42% whereas SEQ ID NO: 197 (without spacers) rescued full length STMN2 mRNA to 26.7%.

[0551] Additionally, as shown in Table 15, a 200 nM dose of SEQ ID NO: 1620 (TCTCTCGSACACACGSACACATG with two spacers) rescued full length STMN2 mRNA to 103% and reduced STMN2 transcript with cryptic exon levels to 1% (reduced by 99%). A 50 nM dose of SEQ ID NO: 1620 rescued full length STMN2 mRNA to 74% and reduced STMN2 transcript with cryptic exon levels to 5% (reduced by 95%). Comparatively, as shown in Table 16, a 200 nM dose and 50 nM dose of SEQ ID NO: 1434 (TCTCTCGCACACACGCACACATG with no spacers) rescued full length STMN2 mRNA to 77.5% and 16.6%, respectively and reduced STMN2 transcript with cryptic exon levels to 2.7% (reduced by 97.3%) and 18.3% (reduced by 81.7%), respectively. This indicates that the addition of spacers improves the performance of SEQ ID NO: 1620 in comparison to the STMN2 AON counterpart without spacers (e.g., SEQ ID NO: 1434).

TABLE 15
Performance of STMN2 AONs (STMN2 oligonucleotides with one,
two, or three spacers).

| | | QPCR potency in | | | | | | QPCR potency in | | | | | |
|---|---|---|---|---|---|---|---|---|---|---|---|---|---|
| SEQ | Sequence (where S indi- | hMN STMN2 FL | | | | | | hMN STMN2 cryptic | | | | | |
| ID | cates presence of a | 50 nM | | | 200 nM | | | 50 nM | | | 200 nM | | |
| NO: | Spacer) (5′ □ 3′) | N | Mean | SD | N | Mean | SD | N | Mean | SD | N | Mean | SD |
| 1622 | TGCAATASGAATATASTTTTAAA | 1 | 1 | 1 | 1 | 47 | 12 | 1 | 76 | 24 | 1 | 340 | 92 |
| 1623 | TCCTGCASTATGAATSTAATTTT | 1 | 6 | 3 | 1 | 31 | 16 | 1 | 82 | 17 | 1 | 100 | 44 |
| 1624 | CTGCAATATGSATATAATTTT | 1 | 5 | 7 | 1 | 11 | 5 | 1 | 104 | 25 | 1 | 61 | 10 |
| 1625 | CTGCAATSTGAATATSATTTTAA | 1 | 2 | 8 | 1 | -4 | 2 | 1 | 116 | 15 | 1 | 147 | 9 |
| 1626 | CCTGCAATATSAATATAATTT | 1 | 2 | 2 | 1 | 42 | 7 | 1 | 65 | 5 | 1 | 59 | 14 |
| 1627 | TCCTGCAATASGAATATAATT | 1 | 19 | 5 | 1 | 65 | 1 | 1 | 85 | 17 | 1 | 36 | 2 |
| 1628 | GTCCTGCSATATGAASATAAT | 5 | 20 | 6 | 5 | 65 | 9 | 5 | 79 | 28 | 5 | 45 | 5 |
| 1629 | GTCCTSCAATATGSATATAAT | 4 | 5 | 6 | 4 | 13 | 22 | 4 | 119 | 31 | 4 | 133 | 53 |
| 1630 | GTCCTGCSATATGSATATAAT | 4 | 16 | 9 | 4 | 71 | 23 | 4 | 97 | 23 | 4 | 51 | 17 |
| 1631 | GTCCTGCSATATGAASATAATTT | 1 | 13 | 9 | 1 | 69 | 3 | 1 | 81 | 10 | 1 | 49 | 4 |
| 1596 | GAGTCCTSCAATATGSATATAATST | 1 | 3 | 4 | 1 | 18 | 9 | 1 | 52 | 41 | 1 | 50 | 41 |
| 1597 | GAGSCCTGCAASATGAATSTAATTT | 1 | 7 | 11 | 1 | 20 | 15 | 1 | 79 | 1 | 1 | 82 | 24 |
| 1418 | GAGTCCSGCAATASGAATATASTTT | 1 | 15 | 2 | 1 | 69 | 13 | 1 | 70 | 23 | 1 | 48 | 8 |
| 1632 | GAGTCCTGCAATATSAATATAATTT | 1 | 27 | 5 | 1 | 75 | 6 | 1 | 55 | 1 | 1 | 24 | 2 |
| 1608 | GAGSCCTGCAATATSAATATAATTT | 1 | 10 | 8 | 1 | 60 | 15 | 1 | 44 | 34 | 1 | 30 | 14 |
| 1609 | GAGTCCTGCASTATGAATATSATTT | 3 | 17 | 7 | 3 | 70 | 25 | 3 | 67 | 16 | 3 | 42 | 15 |
| 1610 | GAGTCCSGCAATATGAATSTAATTT | 4 | 29 | 11 | 4 | 83 | 21 | 4 | 76 | 20 | 4 | 40 | 17 |
| 1611 | GAGTCCSGCAATATGAASATAATTT | 3 | 23 | 3 | 3 | 95 | 46 | 3 | 60 | 22 | 3 | 41 | 8 |
| 1612 | GAGTCCTSCAATSTGAASATAATTT | 1 | -2 | 2 | 1 | 5 | 3 | 1 | 106 | 26 | 1 | 92 | 22 |
| 1613 | GAGTCCSGCAATSTGAATSTAATTT | 1 | 3 | 2 | 1 | 11 | 3 | 1 | 100 | 37 | 1 | 96 | 18 |
| 1614 | GAGTCSTGCAATSTGAATASAATTT | 1 | 8 | 1 | 1 | 2 | 4 | 1 | 94 | 38 | 1 | 101 | 4 |
| 1615 | GAGTSCTGCAATSTGAATATSATTT | 1 | 1 | 2 | 1 | 2 | 5 | 1 | 90 | 10 | 1 | 99 | 19 |
| 1633 | GTCTTCTSCCGAGTCSTGCAATA | 2 | 53 | 3 | 2 | 83 | 23 | 2 | 45 | 8 | 2 | 10 | 2 |
| 1634 | GTCTTCTGCCGSGTCCTGCAATA | 2 | 31 | 21 | 2 | 74 | 0 | 2 | 41 | 6 | 2 | 12 | 5 |
| 1635 | AGGTCTTCSGCCGAGTCCSGCAATA | 1 | 23 | 2 | 0 | N/A | N/A | 1 | 43 | 6 | 0 | N/A | N/A |
| 1617 | CCTTTCTCSCGAAGGTCTTCSGCCG | 5 | 49 | 17 | 5 | 89 | 28 | 5 | 24 | 5 | 5 | 9 | 5 |
| 1618 | CTTTCTCSCGAAGGTSTTCTGCC | 3 | 46 | 13 | 3 | 82 | 22 | 3 | 35 | 15 | 3 | 11 | 3 |
| 1619 | TTTCTCTSGAAGGTCSTCTGCCG | 2 | 42 | 8 | 2 | 80 | 28 | 2 | 40 | 3 | 2 | 12 | 1 |
| 1620 | TCTCTCGSACACACGSACACATG | 4 | 74 | 22 | 4 | 103 | 15 | 4 | 5 | 3 | 3 | 1 | 1 |
| 1589 | AATCCAATTASGAGAGAGTGASGGG | 1 | 7 | 1 | 1 | 32 | 1 | 1 | 107 | 14 | 1 | 47 | 22 |
| 1590 | GAGTCCSGCAATASGAATATAATTT | 1 | 23 | 2 | 1 | 63 | 1 | 1 | 76 | 4 | 1 | 47 | 4 |
| 1591 | GCACACASGCTCACACAGSGAGCCA | 1 | 45 | 5 | 1 | 86 | 6 | 1 | 11 | 5 | 1 | 2 | 1 |
| 1636 | GT*C*C*TGCSATATGAASATAAT | 1 | 18 | 7 | 1 | 53 | 3 | 1 | 75 | 13 | 1 | 74 | 9 |
| 1637 | GT*C*C*TSCAATATGSATATAAT | 1 | 4 | 7 | 1 | 2 | 3 | 1 | 130 | 12 | 1 | 105 | 34 |
| 1638 | GT*C*C*TGCSATATGSATATAAT | 1 | 24 | 19 | 1 | 41 | 5 | 1 | 75 | 1 | 1 | 68 | 9 |
| 1639 | GTCTTCTSCCGAGT*C*S*T*GCAATA | 1 | 26 | 7 | 1 | 67 | 15 | 1 | 60 | 33 | 1 | 30 | 4 |
| 1640 | GT*CT*TC*TGCCGSGTCCTGCAATA | 1 | 33 | 8 | 1 | 63 | 11 | 1 | 36 | 9 | 1 | 17 | 6 |
| 1641 | GTCTTCTGCC*G*S*G*TCCTGCAATA | 1 | 21 | 11 | 1 | 91 | 11 | 1 | 34 | 23 | 1 | 23 | 4 |
| 1642 | CCTTTCTCSCGAAGGTCT*T*C*SGCCG | 2 | 40 | 11 | 2 | 77 | 21 | 2 | 28 | 13 | 2 | 14 | 4 |
| 1643 | CCTTTCTCSCGAAGGTCTT* | 2 | 40 | 13 | 2 | 77 | 6 | 2 | 21 | 4 | 2 | 15 | 1 |
| | C*S*G*CCG | | | | | | | | | | | | |
| 1644 | CTTTCTCSCGAAGG*T*S*T*TCTGCC | 1 | 28 | 5 | 1 | 46 | 17 | 1 | 60 | 7 | 1 | 36 | 13 |
| 1645 | GC*A*CA*C*ASGCTCACASAGAGAGC | 1 | 30 | 1 | 1 | 73 | 7 | 1 | 22 | 6 | 1 | 4 | 1 |
| 1646 | GCACAC*A*S*G*CTCACASAGAGAGC | 1 | 12 | 9 | 1 | 37 | 8 | 1 | 29 | 1 | 1 | 11 | 4 |
| 1647 | TC*TC*TC*GSACACACGSACACATG | 2 | 40 | 1 | 2 | 90 | 7 | 2 | 15 | 1 | 2 | 3 | 2 |
| 1648 | TCTCTCGSACACACGSA*CA*CA*TG | 2 | 58 | 5 | 2 | 108 | 7 | 2 | 19 | 2 | 2 | 7 | 4 |
| 1649 | GTCTTCTS^CCGAGTCS^TGCAATA | 3 | 26 | 9 | 3 | 71 | 9 | 3 | 19 | 5 | 3 | 21 | 9 |

indicates presence of phosphodiester linkage. All other linkages are phosphorothioate linkages.
:^indicates a spacer at the indicated position of the ASO, where the spacer is in accordance with Formula (I), where X is -O-; and n is 2.

TABLE 16
Performance of STMN2 AONs (STMN2 oligonucleotides without spacers).

| | | | | | | | | QPCR potency in hMN | | | | | |
|---|---|---|---|---|---|---|---|---|---|---|---|---|---|
| SEQ | | QPCR potency in hMN STMN2 FL | | | | | | STMN2 cryptic | | | | | |
| ID | | 50 nM | | | 200 nM | | | 50 nM | | | 200 nM | | |
| NO: | Sequence (5′ □ 3′) | N | Mean | SD | N | Mean | SD | N | Mean | SD | N | Mean | SD |
| 144 | AATCCAATTAAGAGAGAGTGATG | 1 | 2 | 3 | 1 | 23 | 5 | 1 | 71 | 21 | 1 | 49 | 8 |
| | GG | | | | | | | | | | | | |
| 146 | AAAATCCAATTAAGAGAGAGTGA | 1 | 11 | 4 | 1 | 19 | 5 | 1 | 45 | 5 | 1 | 36 | 4 |
| | TG | | | | | | | | | | | | |
| 150 | TTTAAAAATCCAATTAAGAGAGA | 3 | 43.7 | 39.4 | 3 | 46.7 | 13.7 | 3 | 38.7 | 20.6 | 3 | 17.7 | 7.1 |
| | GT | | | | | | | | | | | | |
| 169 | CCTGCAATATGAATATAATTTTA | 3 | 36.3 | 5.1 | 3 | 72.3 | 0.6 | 3 | 45.3 | 13.8 | 1 | 11.7 | 2.3 |
| | AA | | | | | | | | | | | | |
| 170 | TCCTGCAATATGAATATAATTTT | 3 | 28.3 | 13.1 | 3 | 86.3 | 12.3 | 3 | 69.3 | 34.7 | 3 | 25.3 | 10.1 |
| | AA | | | | | | | | | | | | |
| 171 | GTCCTGCAATATGAATATAATTT | 3 | 30.7 | 6.5 | 3 | 85.0 | 8.9 | 3 | 56.3 | 10.5 | 3 | 12.3 | 2.5 |
| | TA | | | | | | | | | | | | |
| 172 | AGTCCTGCAATATGAATATAATT | 3 | 33.0 | 8.2 | 3 | 79.3 | 5.1 | 3 | 54.7 | 12.7 | 3 | 15.7 | 5.1 |
| | TT | | | | | | | | | | | | |
| 173 | GAGTCCTGCAATATGAATATAAT | 6 | 29.0 | 13.3 | 6 | 81.5 | 16.1 | 6 | 61.3 | 14.2 | 6 | 21.0 | 7.3 |
| | TT | | | | | | | | | | | | |
| 197 | CCTTTCTCTCGAAGGTCTTCTGC | 8 | 26.7 | 14.5 | 8 | 79.3 | 31.3 | 8 | 44.4 | 15.4 | 8 | 12.1 | 7.2 |
| | CG | | | | | | | | | | | | |
| 237 | GCACACATGCTCACACAGAGAGC | 1 | 46 | 4 | 1 | 80 | 3 | 1 | 7 | 1 | 1 | 1 | 0 |
| | CA | | | | | | | | | | | | |
| 252 | CTCTCTCGCACACACGCACACAT | 5 | 37.6 | 20.0 | 5 | 69.6 | 31.1 | 5 | 19.0 | 9.6 | 5 | 2.3 | 1.5 |
| | gc | | | | | | | | | | | | |
| 1343 | AATCCAATTAAGAGAGAGTGATG | 1 | 7 | 1 | 1 | 15 | 6 | 1 | 56 | 8 | 1 | 33 | 11 |
| 1346 | GTCCTGCAATATGAATATAATTT | 3 | 67.3 | 40.4 | 3 | 98.0 | 10.4 | 3 | 49.3 | 31.0 | 3 | 10.3 | 1.2 |
| 1347 | GTCTTCTGCCGAGTCCTGCAATA | 2 | 12.5 | 3.6 | 2 | 40.2 | 16.7 | 2 | 55.7 | 13.2 | 2 | 20.8 | 15.9 |
| 1348 | GCACACATGCTCACACAGAGAGC | 2 | 45.6 | 13.6 | 2 | 89.5 | 2.1 | 2 | 11.6 | 7.6 | 2 | 0.7 | 0.4 |
| 1351 | AATCCAATTAAGAGAGAGTGA | 1.0 | 10.0 | 2.0 | 1.0 | 12.0 | 2.0 | 1.0 | 69.0 | 5.0 | 1.0 | 35.0 | 9.0 |
| 1353 | GTCCTGCAATATGAATATAAT | 5 | 48.2 | 12.9 | 5 | 100.5 | 18.8 | 5 | 47.2 | 11.4 | 5 | 18.3 | 6.0 |
| 1353 | GT*CC*TG*CAATATGAA*TA*T | 1 | 36.4 | 7.0 | 1 | 84.3 | 7.0 | 1 | 64.0 | 5.0 | 1 | 32.8 | 12.0 |
| | A*AT | | | | | | | | | | | | |
| 1355 | CCTGCAATATGAATATAATTT | 4 | 50.0 | 9.3 | 4 | 79.0 | 19.5 | 4 | 21.5 | 7.2 | 4 | 7.0 | 2.2 |
| 1421 | CCTGCAATATGAATATAATTTTA | 1.0 | 44.0 | 18.0 | 1.0 | 120.0 | 39.0 | 1.0 | 32.0 | 1.0 | 1.0 | 8.0 | 1.0 |
| 1422 | TGCAATATGAATATAATTTTAAA | 4 | 43.9 | 14.5 | 4 | 80.7 | 3.9 | 4 | 40.5 | 8.8 | 4 | 24.0 | 16.3 |
| 1423 | CTGCAATATGAATATAATTTTAA | 3 | 48.0 | 17.6 | 3 | 88.7 | 9.5 | 3 | 38.3 | 13.2 | 3 | 10.7 | 4.9 |
| 1424 | TGCAATATGAATATAATTTTA | 1.0 | 40.0 | 5.0 | 1.0 | 79.0 | 13.0 | 1.0 | 33.0 | 5.0 | 1.0 | 15.0 | 0.0 |
| 1425 | TCCTGCAATATGAATATAATTTT | 4 | 39.0 | 5.1 | 4 | 95.8 | 9.8 | 4 | 40.6 | 14.9 | 4 | 12.0 | 2.9 |
| 1426 | CTGCAATATGAATATAATTTT | 4 | 45.5 | 9.3 | 4 | 85.2 | 6.5 | 4 | 39.4 | 16.7 | 4 | 12.6 | 3.2 |
| 1427 | AGTCCTGCAATATGAATATAATT | 3 | 39.7 | 9.0 | 3 | 76.0 | 18.2 | 3 | 42.3 | 5.7 | 3 | 13.3 | 5.0 |
| 1428 | TCCTGCAATATGAATATAATT | 4 | 43.0 | 14.0 | 4 | 91.5 | 18.6 | 4 | 42.8 | 14.2 | 4 | 10.0 | 2.1 |
| 1429 | TTTCTCTCGAAGGTCTTCTGCCG | 3 | 49.5 | 49.5 | 3 | 85.5 | 44.5 | 3 | 40.9 | 22.8 | 3 | 9.5 | 6.6 |
| 1430 | CCTTTCTCTCGAAGGTCTTCTGC | 1.0 | 41.5 | 5.0 | 1.0 | 98.2 | 10.0 | 1.0 | 27.5 | 8.0 | 1.0 | 5.9 | 1.0 |
| 1431 | CTTTCTCTCGAAGGTCTTCTGCC | 4 | 32.6 | 17.9 | 4 | 83.3 | 37.7 | 4 | 40.6 | 27.1 | 4 | 12.6 | 9.7 |
| 1432 | CTCTCGCACACACGCACACATGC | 4 | 34.0 | 12.7 | 4 | 51.8 | 10.5 | 4 | 25.5 | 8.0 | 4 | 3.1 | 2.1 |
| 1433 | CTCTCTCGCACACACGCACACAT | 1.0 | 20.2 | 2.0 | 1.0 | 60.8 | 6.0 | 1.0 | 6.5 | 7.0 | 1.0 | 2.9 | 2.0 |
| 1434 | TCTCTCGCACACACGCACACATG | 8 | 43.3 | 16.6 | 8 | 77.5 | 19.8 | 8 | 18.3 | 8.0 | 8 | 2.7 | 2.1 |
| 1435 | CTCTCGCACACACGCACACAT | 1.0 | 33.0 | 32.0 | 1.0 | 83.4 | 25.0 | 1.0 | 22.6 | 9.0 | 1.0 | 3.7 | 2.0 |
| 1650 | CT*C*TC*T*CGCACACACGCAC | 1.0 | 26.6 | 4.0 | 1.0 | 68.8 | 1.0 | 1.0 | 40.3 | 3.0 | 1.0 | 13.3 | 3.0 |
| | ACATGC | | | | | | | | | | | | |
| 1651 | TC*TC*TC*GCACACACGCACAC | 1.0 | 46.1 | 7.0 | 1.0 | 91.0 | 6.0 | 1.0 | 32.4 | 1.0 | 1.0 | 8.9 | 1.0 |
| | ATG | | | | | | | | | | | | |
| 1652 | TTTCTCTCGAAGGTCTTCTGC | 2 | 26.0 | 2.4 | 2 | 75.9 | 6.0 | 2 | 49.4 | 2.7 | 2 | 8.9 | 0.8 |
| 1653 | AAAATCCAATTAAGAGAGAGTGA | 1.0 | 15.0 | 2.0 | 1.0 | 19.0 | 2.0 | 1.0 | 49.0 | 3.0 | 1.0 | 29.0 | 5.0 |
| 1654 | AAATCCAATTAAGAGAGAGTGAT | 1.0 | 12.0 | 1.0 | 1.0 | 18.0 | 2.0 | 1.0 | 55.0 | 2.0 | 1.0 | 31.0 | 4.0 |
| 1655 | TAAAAATCCAATTAAGAGAGAGT | 1.0 | 32.0 | 4.0 | 1.0 | 42.0 | 6.0 | 1.0 | 37.0 | 5.0 | 1.0 | 24.0 | 5.0 |
| 1656 | TTTAAAAATCCAATTAAGAGAGA | 1.0 | 25.0 | 1.0 | 1.0 | 32.0 | 1.0 | 1.0 | 37.0 | 4.0 | 1.0 | 29.0 | 2.0 |
| 1657 | TTAAAAATCCAATTAAGAGAGAG | 1.0 | 18.0 | 4.0 | 1.0 | 20.0 | 8.0 | 1.0 | 33.0 | 25.0 | 1.0 | 19.0 | 2.0 |
| 1658 | TAAAAATCCAATTAAGAGAGA | 3 | 21.7 | 7.5 | 3 | 52.0 | 29.1 | 3 | 60.0 | 29.0 | 3 | 42.0 | 18.1 |
| 1659 | CC*T*T*TCTCTCGAAGGTCTTC | 1.0 | 40.0 | 1.0 | 1.0 | 99.7 | 2.0 | 1.0 | 35.5 | 5.0 | 1.0 | 13.8 | 2.0 |
| | TGCCG | | | | | | | | | | | | |
| 1660 | GCACACATGCTCACACA*GA*GA | 1 | 40.8 | 4.0 | 1 | 85.1 | 6.0 | 1 | 12.9 | 2.0 | 1 | 3.4 | 0.0 |
| | *GC | | | | | | | | | | | | |
| 1661 | GC*A*CA*C*ATGCTCACACAGA | 1 | 38.2 | 6.0 | 1 | 81.0 | 3.0 | 1 | 26.0 | 1.0 | 1 | 4.4 | 2.0 |
| | GAGC | | | | | | | | | | | | |

### INCORPORATION BY REFERENCE

[0552] The entire disclosure of each of the patent documents and scientific articles cited herein is incorporated by reference for all purposes.

### EQUIVALENTS

[0553] The disclosure can be embodied in other specific forms without departing from the essential characteristics thereof. The foregoing embodiments therefore are to be considered illustrative rather than limiting on the disclosure described herein. The scope of the disclosure is indicated by the appended claims rather than by the foregoing description, and all changes that come within the meaning and range of equivalency of the claims are intended to be embraced therein.

The application's sequence listing, which the Patent Office published only in electronic form, follows.

SEQUENCE LISTING (1675 sequences)

SEQ ID NO: 1 - DNA, 25 bp, Artificial Sequence
  Description of Artificial Sequence: Synthetic oligonucleotide
ggagggatacctgtatattacaagt

SEQ ID NO: 2 - DNA, 25 bp, Artificial Sequence
  Description of Artificial Sequence: Synthetic oligonucleotide
aggagggatacctgtatattacaag

SEQ ID NO: 3 - DNA, 25 bp, Artificial Sequence
  Description of Artificial Sequence: Synthetic oligonucleotide
caggagggatacctgtatattacaa

SEQ ID NO: 4 - DNA, 25 bp, Artificial Sequence
  Description of Artificial Sequence: Synthetic oligonucleotide
ccaggagggatacctgtatattaca

SEQ ID NO: 5 - DNA, 25 bp, Artificial Sequence
  Description of Artificial Sequence: Synthetic oligonucleotide
accaggagggatacctgtatattac

SEQ ID NO: 6 - DNA, 25 bp, Artificial Sequence
  Description of Artificial Sequence: Synthetic oligonucleotide
taccaggagggatacctgtatatta

SEQ ID NO: 7 - DNA, 25 bp, Artificial Sequence
  Description of Artificial Sequence: Synthetic oligonucleotide
ttaccaggagggatacctgtatatt

SEQ ID NO: 8 - DNA, 25 bp, Artificial Sequence
  Description of Artificial Sequence: Synthetic oligonucleotide
cttaccaggagggatacctgtatat

SEQ ID NO: 9 - DNA, 25 bp, Artificial Sequence
  Description of Artificial Sequence: Synthetic oligonucleotide
gcttaccaggagggatacctgtata

SEQ ID NO: 10 - DNA, 25 bp, Artificial Sequence
  Description of Artificial Sequence: Synthetic oligonucleotide
agcttaccaggagggatacctgtat

SEQ ID NO: 11 - DNA, 25 bp, Artificial Sequence
  Description of Artificial Sequence: Synthetic oligonucleotide
gagcttaccaggagggatacctgta

SEQ ID NO: 12 - DNA, 25 bp, Artificial Sequence
  Description of Artificial Sequence: Synthetic oligonucleotide
agagcttaccaggagggatacctgt

SEQ ID NO: 13 - DNA, 25 bp, Artificial Sequence
  Description of Artificial Sequence: Synthetic oligonucleotide
cagagcttaccaggagggatacctg

SEQ ID NO: 14 - DNA, 25 bp, Artificial Sequence
  Description of Artificial Sequence: Synthetic oligonucleotide
ccagagcttaccaggagggatacct

SEQ ID NO: 15 - DNA, 25 bp, Artificial Sequence
  Description of Artificial Sequence: Synthetic oligonucleotide
accagagcttaccaggagggatacc

SEQ ID NO: 16 - DNA, 25 bp, Artificial Sequence
  Description of Artificial Sequence: Synthetic oligonucleotide
taccagagcttaccaggagggatac

SEQ ID NO: 17 - DNA, 25 bp, Artificial Sequence
  Description of Artificial Sequence: Synthetic oligonucleotide
ataccagagcttaccaggagggata

SEQ ID NO: 18 - DNA, 25 bp, Artificial Sequence
  Description of Artificial Sequence: Synthetic oligonucleotide
aataccagagcttaccaggagggat

SEQ ID NO: 19 - DNA, 25 bp, Artificial Sequence
  Description of Artificial Sequence: Synthetic oligonucleotide
taataccagagcttaccaggaggga

SEQ ID NO: 20 - DNA, 25 bp, Artificial Sequence
  Description of Artificial Sequence: Synthetic oligonucleotide
ataataccagagcttaccaggaggg

SEQ ID NO: 21 - DNA, 25 bp, Artificial Sequence
  Description of Artificial Sequence: Synthetic oligonucleotide
cataataccagagcttaccaggagg

SEQ ID NO: 22 - DNA, 25 bp, Artificial Sequence
  Description of Artificial Sequence: Synthetic oligonucleotide
acataataccagagcttaccaggag

SEQ ID NO: 23 - DNA, 25 bp, Artificial Sequence
  Description of Artificial Sequence: Synthetic oligonucleotide
gacataataccagagcttaccagga

SEQ ID NO: 24 - DNA, 25 bp, Artificial Sequence
  Description of Artificial Sequence: Synthetic oligonucleotide
agacataataccagagcttaccagg

SEQ ID NO: 25 - DNA, 25 bp, Artificial Sequence
  Description of Artificial Sequence: Synthetic oligonucleotide
aagacataataccagagcttaccag

SEQ ID NO: 26 - DNA, 25 bp, Artificial Sequence
  Description of Artificial Sequence: Synthetic oligonucleotide
taagacataataccagagcttacca

SEQ ID NO: 27 - DNA, 25 bp, Artificial Sequence
  Description of Artificial Sequence: Synthetic oligonucleotide
ttaagacataataccagagcttacc

SEQ ID NO: 28 - DNA, 25 bp, Artificial Sequence
  Description of Artificial Sequence: Synthetic oligonucleotide
gttaagacataataccagagcttac

SEQ ID NO: 29 - DNA, 25 bp, Artificial Sequence
  Description of Artificial Sequence: Synthetic oligonucleotide
tgttaagacataataccagagctta

SEQ ID NO: 30 - DNA, 25 bp, Artificial Sequence
  Description of Artificial Sequence: Synthetic oligonucleotide
atgttaagacataataccagagctt

SEQ ID NO: 31 - DNA, 25 bp, Artificial Sequence
  Description of Artificial Sequence: Synthetic oligonucleotide
aatgttaagacataataccagagct

SEQ ID NO: 32 - DNA, 25 bp, Artificial Sequence
  Description of Artificial Sequence: Synthetic oligonucleotide
aaatgttaagacataataccagagc

SEQ ID NO: 33 - DNA, 25 bp, Artificial Sequence
  Description of Artificial Sequence: Synthetic oligonucleotide
aaaatgttaagacataataccagag

SEQ ID NO: 34 - DNA, 25 bp, Artificial Sequence
  Description of Artificial Sequence: Synthetic oligonucleotide
aaaaatgttaagacataataccaga

SEQ ID NO: 35 - DNA, 25 bp, Artificial Sequence
  Description of Artificial Sequence: Synthetic oligonucleotide
taaaaatgttaagacataataccag

SEQ ID NO: 36 - DNA, 25 bp, Artificial Sequence
  Description of Artificial Sequence: Synthetic oligonucleotide
ttaaaaatgttaagacataatacca

SEQ ID NO: 37 - DNA, 25 bp, Artificial Sequence
  Description of Artificial Sequence: Synthetic oligonucleotide
tttaaaaatgttaagacataatacc

SEQ ID NO: 38 - DNA, 25 bp, Artificial Sequence
  Description of Artificial Sequence: Synthetic oligonucleotide
atttaaaaatgttaagacataatac

SEQ ID NO: 39 - DNA, 25 bp, Artificial Sequence
  Description of Artificial Sequence: Synthetic oligonucleotide
gatttaaaaatgttaagacataata

SEQ ID NO: 40 - DNA, 25 bp, Artificial Sequence
  Description of Artificial Sequence: Synthetic oligonucleotide
agatttaaaaatgttaagacataat

SEQ ID NO: 41 - DNA, 25 bp, Artificial Sequence
  Description of Artificial Sequence: Synthetic oligonucleotide
tagatttaaaaatgttaagacataa

SEQ ID NO: 42 - DNA, 25 bp, Artificial Sequence
  Description of Artificial Sequence: Synthetic oligonucleotide
atagatttaaaaatgttaagacata

SEQ ID NO: 43 - DNA, 25 bp, Artificial Sequence
  Description of Artificial Sequence: Synthetic oligonucleotide
catagatttaaaaatgttaagacat

SEQ ID NO: 44 - DNA, 25 bp, Artificial Sequence
  Description of Artificial Sequence: Synthetic oligonucleotide
ccatagatttaaaaatgttaagaca

SEQ ID NO: 45 - DNA, 25 bp, Artificial Sequence
  Description of Artificial Sequence: Synthetic oligonucleotide
accatagatttaaaaatgttaagac

SEQ ID NO: 46 - DNA, 25 bp, Artificial Sequence
  Description of Artificial Sequence: Synthetic oligonucleotide
taccatagatttaaaaatgttaaga

SEQ ID NO: 47 - DNA, 25 bp, Artificial Sequence
  Description of Artificial Sequence: Synthetic oligonucleotide
ttaccatagatttaaaaatgttaag

SEQ ID NO: 48 - DNA, 25 bp, Artificial Sequence
  Description of Artificial Sequence: Synthetic oligonucleotide
attaccatagatttaaaaatgttaa

SEQ ID NO: 49 - DNA, 25 bp, Artificial Sequence
  Description of Artificial Sequence: Synthetic oligonucleotide
gattaccatagatttaaaaatgtta

SEQ ID NO: 50 - DNA, 25 bp, Artificial Sequence
  Description of Artificial Sequence: Synthetic oligonucleotide
agattaccatagatttaaaaatgtt

SEQ ID NO: 51 - DNA, 25 bp, Artificial Sequence
  Description of Artificial Sequence: Synthetic oligonucleotide
aagattaccatagatttaaaaatgt

SEQ ID NO: 52 - DNA, 25 bp, Artificial Sequence
  Description of Artificial Sequence: Synthetic oligonucleotide
aaagattaccatagatttaaaaatg

SEQ ID NO: 53 - DNA, 25 bp, Artificial Sequence
  Description of Artificial Sequence: Synthetic oligonucleotide
taaagattaccatagatttaaaaat

SEQ ID NO: 54 - DNA, 25 bp, Artificial Sequence
  Description of Artificial Sequence: Synthetic oligonucleotide
gtaaagattaccatagatttaaaaa

SEQ ID NO: 55 - DNA, 25 bp, Artificial Sequence
  Description of Artificial Sequence: Synthetic oligonucleotide
tgtaaagattaccatagatttaaaa

SEQ ID NO: 56 - DNA, 25 bp, Artificial Sequence
  Description of Artificial Sequence: Synthetic oligonucleotide
ttgtaaagattaccatagatttaaa

SEQ ID NO: 57 - DNA, 25 bp, Artificial Sequence
  Description of Artificial Sequence: Synthetic oligonucleotide
tttgtaaagattaccatagatttaa

SEQ ID NO: 58 - DNA, 25 bp, Artificial Sequence
  Description of Artificial Sequence: Synthetic oligonucleotide
ttttgtaaagattaccatagattta

SEQ ID NO: 59 - DNA, 25 bp, Artificial Sequence
  Description of Artificial Sequence: Synthetic oligonucleotide
attttgtaaagattaccatagattt

SEQ ID NO: 60 - DNA, 25 bp, Artificial Sequence
  Description of Artificial Sequence: Synthetic oligonucleotide
tattttgtaaagattaccatagatt

SEQ ID NO: 61 - DNA, 25 bp, Artificial Sequence
  Description of Artificial Sequence: Synthetic oligonucleotide
atattttgtaaagattaccatagat

SEQ ID NO: 62 - DNA, 25 bp, Artificial Sequence
  Description of Artificial Sequence: Synthetic oligonucleotide
aatattttgtaaagattaccataga

SEQ ID NO: 63 - DNA, 25 bp, Artificial Sequence
  Description of Artificial Sequence: Synthetic oligonucleotide
aaatattttgtaaagattaccatag

SEQ ID NO: 64 - DNA, 25 bp, Artificial Sequence
  Description of Artificial Sequence: Synthetic oligonucleotide
aaaatattttgtaaagattaccata

SEQ ID NO: 65 - DNA, 25 bp, Artificial Sequence
  Description of Artificial Sequence: Synthetic oligonucleotide
taaaatattttgtaaagattaccat

SEQ ID NO: 66 - DNA, 25 bp, Artificial Sequence
  Description of Artificial Sequence: Synthetic oligonucleotide
gtaaaatattttgtaaagattacca

SEQ ID NO: 67 - DNA, 25 bp, Artificial Sequence
  Description of Artificial Sequence: Synthetic oligonucleotide
agtaaaatattttgtaaagattacc

SEQ ID NO: 68 - DNA, 25 bp, Artificial Sequence
  Description of Artificial Sequence: Synthetic oligonucleotide
aagtaaaatattttgtaaagattac

SEQ ID NO: 69 - DNA, 25 bp, Artificial Sequence
  Description of Artificial Sequence: Synthetic oligonucleotide
gaagtaaaatattttgtaaagatta

SEQ ID NO: 70 - DNA, 25 bp, Artificial Sequence
  Description of Artificial Sequence: Synthetic oligonucleotide
ggaagtaaaatattttgtaaagatt

SEQ ID NO: 71 - DNA, 25 bp, Artificial Sequence
  Description of Artificial Sequence: Synthetic oligonucleotide
cggaagtaaaatattttgtaaagat

SEQ ID NO: 72 - DNA, 25 bp, Artificial Sequence
  Description of Artificial Sequence: Synthetic oligonucleotide
tcggaagtaaaatattttgtaaaga

SEQ ID NO: 73 - DNA, 25 bp, Artificial Sequence
  Description of Artificial Sequence: Synthetic oligonucleotide
ttcggaagtaaaatattttgtaaag

SEQ ID NO: 74 - DNA, 25 bp, Artificial Sequence
  Description of Artificial Sequence: Synthetic oligonucleotide
gttcggaagtaaaatattttgtaaa

SEQ ID NO: 75 - DNA, 25 bp, Artificial Sequence
  Description of Artificial Sequence: Synthetic oligonucleotide
agttcggaagtaaaatattttgtaa

SEQ ID NO: 76 - DNA, 25 bp, Artificial Sequence
  Description of Artificial Sequence: Synthetic oligonucleotide
gagttcggaagtaaaatattttgta

SEQ ID NO: 77 - DNA, 25 bp, Artificial Sequence
  Description of Artificial Sequence: Synthetic oligonucleotide
tgagttcggaagtaaaatattttgt

SEQ ID NO: 78 - DNA, 25 bp, Artificial Sequence
  Description of Artificial Sequence: Synthetic oligonucleotide
atgagttcggaagtaaaatattttg

SEQ ID NO: 79 - DNA, 25 bp, Artificial Sequence
  Description of Artificial Sequence: Synthetic oligonucleotide
tatgagttcggaagtaaaatatttt

SEQ ID NO: 80 - DNA, 25 bp, Artificial Sequence
  Description of Artificial Sequence: Synthetic oligonucleotide
atatgagttcggaagtaaaatattt

SEQ ID NO: 81 - DNA, 25 bp, Artificial Sequence
  Description of Artificial Sequence: Synthetic oligonucleotide
tatatgagttcggaagtaaaatatt

SEQ ID NO: 82 - DNA, 25 bp, Artificial Sequence
  Description of Artificial Sequence: Synthetic oligonucleotide
gtatatgagttcggaagtaaaatat

SEQ ID NO: 83 - DNA, 25 bp, Artificial Sequence
  Description of Artificial Sequence: Synthetic oligonucleotide
ggtatatgagttcggaagtaaaata

SEQ ID NO: 84 - DNA, 25 bp, Artificial Sequence
  Description of Artificial Sequence: Synthetic oligonucleotide
aggtatatgagttcggaagtaaaat

SEQ ID NO: 85 - DNA, 25 bp, Artificial Sequence
  Description of Artificial Sequence: Synthetic oligonucleotide
caggtatatgagttcggaagtaaaa

SEQ ID NO: 86 - DNA, 25 bp, Artificial Sequence
  Description of Artificial Sequence: Synthetic oligonucleotide
ccaggtatatgagttcggaagtaaa

SEQ ID NO: 87 - DNA, 25 bp, Artificial Sequence
  Description of Artificial Sequence: Synthetic oligonucleotide
cccaggtatatgagttcggaagtaa

SEQ ID NO: 88 - DNA, 25 bp, Artificial Sequence
  Description of Artificial Sequence: Synthetic oligonucleotide
ccccaggtatatgagttcggaagta

SEQ ID NO: 89 - DNA, 25 bp, Artificial Sequence
  Description of Artificial Sequence: Synthetic oligonucleotide
tccccaggtatatgagttcggaagt

SEQ ID NO: 90 - DNA, 25 bp, Artificial Sequence
  Description of Artificial Sequence: Synthetic oligonucleotide
atccccaggtatatgagttcggaag

SEQ ID NO: 91 - DNA, 25 bp, Artificial Sequence
  Description of Artificial Sequence: Synthetic oligonucleotide
aatccccaggtatatgagttcggaa

SEQ ID NO: 92 - DNA, 25 bp, Artificial Sequence
  Description of Artificial Sequence: Synthetic oligonucleotide
aaatccccaggtatatgagttcgga

SEQ ID NO: 93 - DNA, 25 bp, Artificial Sequence
  Description of Artificial Sequence: Synthetic oligonucleotide
aaaatccccaggtatatgagttcgg

SEQ ID NO: 94 - DNA, 25 bp, Artificial Sequence
  Description of Artificial Sequence: Synthetic oligonucleotide
taaaatccccaggtatatgagttcg

SEQ ID NO: 95 - DNA, 25 bp, Artificial Sequence
  Description of Artificial Sequence: Synthetic oligonucleotide
ataaaatccccaggtatatgagttc

SEQ ID NO: 96 - DNA, 25 bp, Artificial Sequence
  Description of Artificial Sequence: Synthetic oligonucleotide
aataaaatccccaggtatatgagtt

SEQ ID NO: 97 - DNA, 25 bp, Artificial Sequence
  Description of Artificial Sequence: Synthetic oligonucleotide
taataaaatccccaggtatatgagt

SEQ ID NO: 98 - DNA, 25 bp, Artificial Sequence
  Description of Artificial Sequence: Synthetic oligonucleotide
gtaataaaatccccaggtatatgag

SEQ ID NO: 99 - DNA, 25 bp, Artificial Sequence
  Description of Artificial Sequence: Synthetic oligonucleotide
agtaataaaatccccaggtatatga

SEQ ID NO: 100 - DNA, 25 bp, Artificial Sequence
  Description of Artificial Sequence: Synthetic oligonucleotide
gagtaataaaatccccaggtatatg

SEQ ID NO: 101 - DNA, 25 bp, Artificial Sequence
  Description of Artificial Sequence: Synthetic oligonucleotide
agagtaataaaatccccaggtatat

SEQ ID NO: 102 - DNA, 25 bp, Artificial Sequence
  Description of Artificial Sequence: Synthetic oligonucleotide
cagagtaataaaatccccaggtata

SEQ ID NO: 103 - DNA, 25 bp, Artificial Sequence
  Description of Artificial Sequence: Synthetic oligonucleotide
ccagagtaataaaatccccaggtat

SEQ ID NO: 104 - DNA, 25 bp, Artificial Sequence
  Description of Artificial Sequence: Synthetic oligonucleotide
cccagagtaataaaatccccaggta

SEQ ID NO: 105 - DNA, 25 bp, Artificial Sequence
  Description of Artificial Sequence: Synthetic oligonucleotide
tcccagagtaataaaatccccaggt

SEQ ID NO: 106 - DNA, 25 bp, Artificial Sequence
  Description of Artificial Sequence: Synthetic oligonucleotide
ttcccagagtaataaaatccccagg

SEQ ID NO: 107 - DNA, 25 bp, Artificial Sequence
  Description of Artificial Sequence: Synthetic oligonucleotide
attcccagagtaataaaatccccag

SEQ ID NO: 108 - DNA, 25 bp, Artificial Sequence
  Description of Artificial Sequence: Synthetic oligonucleotide
aattcccagagtaataaaatcccca

SEQ ID NO: 109 - DNA, 25 bp, Artificial Sequence
  Description of Artificial Sequence: Synthetic oligonucleotide
taattcccagagtaataaaatcccc

SEQ ID NO: 110 - DNA, 25 bp, Artificial Sequence
  Description of Artificial Sequence: Synthetic oligonucleotide
ataattcccagagtaataaaatccc

SEQ ID NO: 111 - DNA, 25 bp, Artificial Sequence
  Description of Artificial Sequence: Synthetic oligonucleotide
cataattcccagagtaataaaatcc

SEQ ID NO: 112 - DNA, 25 bp, Artificial Sequence
  Description of Artificial Sequence: Synthetic oligonucleotide
acataattcccagagtaataaaatc

SEQ ID NO: 113 - DNA, 25 bp, Artificial Sequence
  Description of Artificial Sequence: Synthetic oligonucleotide
cacataattcccagagtaataaaat

SEQ ID NO: 114 - DNA, 25 bp, Artificial Sequence
  Description of Artificial Sequence: Synthetic oligonucleotide
acacataattcccagagtaataaaa

SEQ ID NO: 115 - DNA, 25 bp, Artificial Sequence
  Description of Artificial Sequence: Synthetic oligonucleotide
aacacataattcccagagtaataaa

SEQ ID NO: 116 - DNA, 25 bp, Artificial Sequence
  Description of Artificial Sequence: Synthetic oligonucleotide
gaacacataattcccagagtaataa

SEQ ID NO: 117 - DNA, 25 bp, Artificial Sequence
  Description of Artificial Sequence: Synthetic oligonucleotide
agaacacataattcccagagtaata

SEQ ID NO: 118 - DNA, 25 bp, Artificial Sequence
  Description of Artificial Sequence: Synthetic oligonucleotide
cagaacacataattcccagagtaat

SEQ ID NO: 119 - DNA, 25 bp, Artificial Sequence
  Description of Artificial Sequence: Synthetic oligonucleotide
gcagaacacataattcccagagtaa

SEQ ID NO: 120 - DNA, 25 bp, Artificial Sequence
  Description of Artificial Sequence: Synthetic oligonucleotide
ggcagaacacataattcccagagta

SEQ ID NO: 121 - DNA, 25 bp, Artificial Sequence
  Description of Artificial Sequence: Synthetic oligonucleotide
gggcagaacacataattcccagagt

SEQ ID NO: 122 - DNA, 25 bp, Artificial Sequence
  Description of Artificial Sequence: Synthetic oligonucleotide
ggggcagaacacataattcccagag

SEQ ID NO: 123 - DNA, 25 bp, Artificial Sequence
  Description of Artificial Sequence: Synthetic oligonucleotide
tggggcagaacacataattcccaga

SEQ ID NO: 124 - DNA, 25 bp, Artificial Sequence
  Description of Artificial Sequence: Synthetic oligonucleotide
atggggcagaacacataattcccag

SEQ ID NO: 125 - DNA, 25 bp, Artificial Sequence
  Description of Artificial Sequence: Synthetic oligonucleotide
gatggggcagaacacataattccca

SEQ ID NO: 126 - DNA, 25 bp, Artificial Sequence
  Description of Artificial Sequence: Synthetic oligonucleotide
tgatggggcagaacacataattccc

SEQ ID NO: 127 - DNA, 25 bp, Artificial Sequence
  Description of Artificial Sequence: Synthetic oligonucleotide
gtgatggggcagaacacataattcc

SEQ ID NO: 128 - DNA, 25 bp, Artificial Sequence
  Description of Artificial Sequence: Synthetic oligonucleotide
agtgatggggcagaacacataattc

SEQ ID NO: 129 - DNA, 25 bp, Artificial Sequence
  Description of Artificial Sequence: Synthetic oligonucleotide
gagtgatggggcagaacacataatt

SEQ ID NO: 130 - DNA, 25 bp, Artificial Sequence
  Description of Artificial Sequence: Synthetic oligonucleotide
agagtgatggggcagaacacataat

SEQ ID NO: 131 - DNA, 25 bp, Artificial Sequence
  Description of Artificial Sequence: Synthetic oligonucleotide
gagagtgatggggcagaacacataa

SEQ ID NO: 132 - DNA, 25 bp, Artificial Sequence
  Description of Artificial Sequence: Synthetic oligonucleotide
agagagtgatggggcagaacacata

SEQ ID NO: 133 - DNA, 25 bp, Artificial Sequence
  Description of Artificial Sequence: Synthetic oligonucleotide
gagagagtgatggggcagaacacat

SEQ ID NO: 134 - DNA, 25 bp, Artificial Sequence
  Description of Artificial Sequence: Synthetic oligonucleotide
agagagagtgatggggcagaacaca

SEQ ID NO: 135 - DNA, 25 bp, Artificial Sequence
  Description of Artificial Sequence: Synthetic oligonucleotide
aagagagagtgatggggcagaacac

SEQ ID NO: 136 - DNA, 25 bp, Artificial Sequence
  Description of Artificial Sequence: Synthetic oligonucleotide
taagagagagtgatggggcagaaca

SEQ ID NO: 137 - DNA, 25 bp, Artificial Sequence
  Description of Artificial Sequence: Synthetic oligonucleotide
ttaagagagagtgatggggcagaac

SEQ ID NO: 138 - DNA, 25 bp, Artificial Sequence
  Description of Artificial Sequence: Synthetic oligonucleotide
attaagagagagtgatggggcagaa

SEQ ID NO: 139 - DNA, 25 bp, Artificial Sequence
  Description of Artificial Sequence: Synthetic oligonucleotide
aattaagagagagtgatggggcaga

SEQ ID NO: 140 - DNA, 25 bp, Artificial Sequence
  Description of Artificial Sequence: Synthetic oligonucleotide
caattaagagagagtgatggggcag

SEQ ID NO: 141 - DNA, 25 bp, Artificial Sequence
  Description of Artificial Sequence: Synthetic oligonucleotide
ccaattaagagagagtgatggggca

SEQ ID NO: 142 - DNA, 25 bp, Artificial Sequence
  Description of Artificial Sequence: Synthetic oligonucleotide
tccaattaagagagagtgatggggc

SEQ ID NO: 143 - DNA, 25 bp, Artificial Sequence
  Description of Artificial Sequence: Synthetic oligonucleotide
atccaattaagagagagtgatgggg

SEQ ID NO: 144 - DNA, 25 bp, Artificial Sequence
  Description of Artificial Sequence: Synthetic oligonucleotide
aatccaattaagagagagtgatggg

SEQ ID NO: 145 - DNA, 25 bp, Artificial Sequence
  Description of Artificial Sequence: Synthetic oligonucleotide
aaatccaattaagagagagtgatgg

SEQ ID NO: 146 - DNA, 25 bp, Artificial Sequence
  Description of Artificial Sequence: Synthetic oligonucleotide
aaaatccaattaagagagagtgatg

SEQ ID NO: 147 - DNA, 25 bp, Artificial Sequence
  Description of Artificial Sequence: Synthetic oligonucleotide
aaaaatccaattaagagagagtgat

SEQ ID NO: 148 - DNA, 25 bp, Artificial Sequence
  Description of Artificial Sequence: Synthetic oligonucleotide
taaaaatccaattaagagagagtga

SEQ ID NO: 149 - DNA, 25 bp, Artificial Sequence
  Description of Artificial Sequence: Synthetic oligonucleotide
ttaaaaatccaattaagagagagtg

SEQ ID NO: 150 - DNA, 25 bp, Artificial Sequence
  Description of Artificial Sequence: Synthetic oligonucleotide
tttaaaaatccaattaagagagagt

SEQ ID NO: 151 - DNA, 25 bp, Artificial Sequence
  Description of Artificial Sequence: Synthetic oligonucleotide
ttttaaaaatccaattaagagagag

SEQ ID NO: 152 - DNA, 25 bp, Artificial Sequence
  Description of Artificial Sequence: Synthetic oligonucleotide
attttaaaaatccaattaagagaga

SEQ ID NO: 153 - DNA, 25 bp, Artificial Sequence
  Description of Artificial Sequence: Synthetic oligonucleotide
aattttaaaaatccaattaagagag

SEQ ID NO: 154 - DNA, 25 bp, Artificial Sequence
  Description of Artificial Sequence: Synthetic oligonucleotide
taattttaaaaatccaattaagaga

SEQ ID NO: 155 - DNA, 25 bp, Artificial Sequence
  Description of Artificial Sequence: Synthetic oligonucleotide
ataattttaaaaatccaattaagag

SEQ ID NO: 156 - DNA, 25 bp, Artificial Sequence
  Description of Artificial Sequence: Synthetic oligonucleotide
tataattttaaaaatccaattaaga

SEQ ID NO: 157 - DNA, 25 bp, Artificial Sequence
  Description of Artificial Sequence: Synthetic oligonucleotide
atataattttaaaaatccaattaag

SEQ ID NO: 158 - DNA, 25 bp, Artificial Sequence
  Description of Artificial Sequence: Synthetic oligonucleotide
aatataattttaaaaatccaattaa

SEQ ID NO: 159 - DNA, 25 bp, Artificial Sequence
  Description of Artificial Sequence: Synthetic oligonucleotide
gaatataattttaaaaatccaatta

SEQ ID NO: 160 - DNA, 25 bp, Artificial Sequence
  Description of Artificial Sequence: Synthetic oligonucleotide
tgaatataattttaaaaatccaatt

SEQ ID NO: 161 - DNA, 25 bp, Artificial Sequence
  Description of Artificial Sequence: Synthetic oligonucleotide
atgaatataattttaaaaatccaat

SEQ ID NO: 162 - DNA, 25 bp, Artificial Sequence
  Description of Artificial Sequence: Synthetic oligonucleotide
tatgaatataattttaaaaatccaa

SEQ ID NO: 163 - DNA, 25 bp, Artificial Sequence
  Description of Artificial Sequence: Synthetic oligonucleotide
atatgaatataattttaaaaatcca

SEQ ID NO: 164 - DNA, 25 bp, Artificial Sequence
  Description of Artificial Sequence: Synthetic oligonucleotide
aatatgaatataattttaaaaatcc

SEQ ID NO: 165 - DNA, 25 bp, Artificial Sequence
  Description of Artificial Sequence: Synthetic oligonucleotide
caatatgaatataattttaaaaatc

SEQ ID NO: 166 - DNA, 25 bp, Artificial Sequence
  Description of Artificial Sequence: Synthetic oligonucleotide
gcaatatgaatataattttaaaaat

SEQ ID NO: 167 - DNA, 25 bp, Artificial Sequence
  Description of Artificial Sequence: Synthetic oligonucleotide
tgcaatatgaatataattttaaaaa

SEQ ID NO: 168 - DNA, 25 bp, Artificial Sequence
  Description of Artificial Sequence: Synthetic oligonucleotide
ctgcaatatgaatataattttaaaa

SEQ ID NO: 169 - DNA, 25 bp, Artificial Sequence
  Description of Artificial Sequence: Synthetic oligonucleotide
cctgcaatatgaatataattttaaa

SEQ ID NO: 170 - DNA, 25 bp, Artificial Sequence
  Description of Artificial Sequence: Synthetic oligonucleotide
tcctgcaatatgaatataattttaa

SEQ ID NO: 171 - DNA, 25 bp, Artificial Sequence
  Description of Artificial Sequence: Synthetic oligonucleotide
gtcctgcaatatgaatataatttta

SEQ ID NO: 172 - DNA, 25 bp, Artificial Sequence
  Description of Artificial Sequence: Synthetic oligonucleotide
agtcctgcaatatgaatataatttt

SEQ ID NO: 173 - DNA, 25 bp, Artificial Sequence
  Description of Artificial Sequence: Synthetic oligonucleotide
gagtcctgcaatatgaatataattt

SEQ ID NO: 174 - DNA, 25 bp, Artificial Sequence
  Description of Artificial Sequence: Synthetic oligonucleotide
cgagtcctgcaatatgaatataatt

SEQ ID NO: 175 - DNA, 25 bp, Artificial Sequence
  Description of Artificial Sequence: Synthetic oligonucleotide
ccgagtcctgcaatatgaatataat

SEQ ID NO: 176 - DNA, 25 bp, Artificial Sequence
  Description of Artificial Sequence: Synthetic oligonucleotide
gccgagtcctgcaatatgaatataa

SEQ ID NO: 177 - DNA, 25 bp, Artificial Sequence
  Description of Artificial Sequence: Synthetic oligonucleotide
tgccgagtcctgcaatatgaatata

SEQ ID NO: 178 - DNA, 25 bp, Artificial Sequence
  Description of Artificial Sequence: Synthetic oligonucleotide
ctgccgagtcctgcaatatgaatat

SEQ ID NO: 179 - DNA, 25 bp, Artificial Sequence
  Description of Artificial Sequence: Synthetic oligonucleotide
tctgccgagtcctgcaatatgaata

SEQ ID NO: 180 - DNA, 25 bp, Artificial Sequence
  Description of Artificial Sequence: Synthetic oligonucleotide
ttctgccgagtcctgcaatatgaat

SEQ ID NO: 181 - DNA, 25 bp, Artificial Sequence
  Description of Artificial Sequence: Synthetic oligonucleotide
cttctgccgagtcctgcaatatgaa

SEQ ID NO: 182 - DNA, 25 bp, Artificial Sequence
  Description of Artificial Sequence: Synthetic oligonucleotide
tcttctgccgagtcctgcaatatga

SEQ ID NO: 183 - DNA, 25 bp, Artificial Sequence
  Description of Artificial Sequence: Synthetic oligonucleotide
gtcttctgccgagtcctgcaatatg

SEQ ID NO: 184 - DNA, 25 bp, Artificial Sequence
  Description of Artificial Sequence: Synthetic oligonucleotide
ggtcttctgccgagtcctgcaatat

SEQ ID NO: 185 - DNA, 25 bp, Artificial Sequence
  Description of Artificial Sequence: Synthetic oligonucleotide
aggtcttctgccgagtcctgcaata

SEQ ID NO: 186 - DNA, 25 bp, Artificial Sequence
  Description of Artificial Sequence: Synthetic oligonucleotide
aaggtcttctgccgagtcctgcaat

SEQ ID NO: 187 - DNA, 25 bp, Artificial Sequence
  Description of Artificial Sequence: Synthetic oligonucleotide
gaaggtcttctgccgagtcctgcaa

SEQ ID NO: 188 - DNA, 25 bp, Artificial Sequence
  Description of Artificial Sequence: Synthetic oligonucleotide
cgaaggtcttctgccgagtcctgca

SEQ ID NO: 189 - DNA, 25 bp, Artificial Sequence
  Description of Artificial Sequence: Synthetic oligonucleotide
tcgaaggtcttctgccgagtcctgc

SEQ ID NO: 190 - DNA, 25 bp, Artificial Sequence
  Description of Artificial Sequence: Synthetic oligonucleotide
ctcgaaggtcttctgccgagtcctg

SEQ ID NO: 191 - DNA, 25 bp, Artificial Sequence
  Description of Artificial Sequence: Synthetic oligonucleotide
tctcgaaggtcttctgccgagtcct

SEQ ID NO: 192 - DNA, 25 bp, Artificial Sequence
  Description of Artificial Sequence: Synthetic oligonucleotide
ctctcgaaggtcttctgccgagtcc

SEQ ID NO: 193 - DNA, 25 bp, Artificial Sequence
  Description of Artificial Sequence: Synthetic oligonucleotide
tctctcgaaggtcttctgccgagtc

SEQ ID NO: 194 - DNA, 25 bp, Artificial Sequence
  Description of Artificial Sequence: Synthetic oligonucleotide
ttctctcgaaggtcttctgccgagt

SEQ ID NO: 195 - DNA, 25 bp, Artificial Sequence
  Description of Artificial Sequence: Synthetic oligonucleotide
tttctctcgaaggtcttctgccgag

SEQ ID NO: 196 - DNA, 25 bp, Artificial Sequence
  Description of Artificial Sequence: Synthetic oligonucleotide
ctttctctcgaaggtcttctgccga

SEQ ID NO: 197 - DNA, 25 bp, Artificial Sequence
  Description of Artificial Sequence: Synthetic oligonucleotide
cctttctctcgaaggtcttctgccg

SEQ ID NO: 198 - DNA, 25 bp, Artificial Sequence
  Description of Artificial Sequence: Synthetic oligonucleotide
acctttctctcgaaggtcttctgcc

SEQ ID NO: 199 - DNA, 25 bp, Artificial Sequence
  Description of Artificial Sequence: Synthetic oligonucleotide
tacctttctctcgaaggtcttctgc

SEQ ID NO: 200 - DNA, 25 bp, Artificial Sequence
  Description of Artificial Sequence: Synthetic oligonucleotide
ctacctttctctcgaaggtcttctg

SEQ ID NO: 201 - DNA, 25 bp, Artificial Sequence
  Description of Artificial Sequence: Synthetic oligonucleotide
tctacctttctctcgaaggtcttct

SEQ ID NO: 202 - DNA, 25 bp, Artificial Sequence
  Description of Artificial Sequence: Synthetic oligonucleotide
ttctacctttctctcgaaggtcttc

SEQ ID NO: 203 - DNA, 25 bp, Artificial Sequence
  Description of Artificial Sequence: Synthetic oligonucleotide
tttctacctttctctcgaaggtctt

SEQ ID NO: 204 - DNA, 25 bp, Artificial Sequence
  Description of Artificial Sequence: Synthetic oligonucleotide
ttttctacctttctctcgaaggtct

SEQ ID NO: 205 - DNA, 25 bp, Artificial Sequence
  Description of Artificial Sequence: Synthetic oligonucleotide
attttctacctttctctcgaaggtc

SEQ ID NO: 206 - DNA, 25 bp, Artificial Sequence
  Description of Artificial Sequence: Synthetic oligonucleotide
tattttctacctttctctcgaaggt

SEQ ID NO: 207 - DNA, 25 bp, Artificial Sequence
  Description of Artificial Sequence: Synthetic oligonucleotide
ttattttctacctttctctcgaagg

SEQ ID NO: 208 - DNA, 25 bp, Artificial Sequence
  Description of Artificial Sequence: Synthetic oligonucleotide
cttattttctacctttctctcgaag

SEQ ID NO: 209 - DNA, 25 bp, Artificial Sequence
  Description of Artificial Sequence: Synthetic oligonucleotide
tcttattttctacctttctctcgaa

SEQ ID NO: 210 - DNA, 25 bp, Artificial Sequence
  Description of Artificial Sequence: Synthetic oligonucleotide
ttcttattttctacctttctctcga

SEQ ID NO: 211 - DNA, 25 bp, Artificial Sequence
  Description of Artificial Sequence: Synthetic oligonucleotide
attcttattttctacctttctctcg

SEQ ID NO: 212 - DNA, 25 bp, Artificial Sequence
  Description of Artificial Sequence: Synthetic oligonucleotide
aattcttattttctacctttctctc

SEQ ID NO: 213 - DNA, 25 bp, Artificial Sequence
  Description of Artificial Sequence: Synthetic oligonucleotide
aaattcttattttctacctttctct

SEQ ID NO: 214 - DNA, 25 bp, Artificial Sequence
  Description of Artificial Sequence: Synthetic oligonucleotide
caaattcttattttctacctttctc

SEQ ID NO: 215 - DNA, 25 bp, Artificial Sequence
  Description of Artificial Sequence: Synthetic oligonucleotide
ccaaattcttattttctacctttct

SEQ ID NO: 216 - DNA, 25 bp, Artificial Sequence
  Description of Artificial Sequence: Synthetic oligonucleotide
gccaaattcttattttctacctttc

SEQ ID NO: 217 - DNA, 25 bp, Artificial Sequence
  Description of Artificial Sequence: Synthetic oligonucleotide
agccaaattcttattttctaccttt

SEQ ID NO: 218 - DNA, 25 bp, Artificial Sequence
  Description of Artificial Sequence: Synthetic oligonucleotide
gagccaaattcttattttctacctt

SEQ ID NO: 219 - DNA, 25 bp, Artificial Sequence
  Description of Artificial Sequence: Synthetic oligonucleotide
agagccaaattcttattttctacct

SEQ ID NO: 220 - DNA, 25 bp, Artificial Sequence
  Description of Artificial Sequence: Synthetic oligonucleotide
gagagccaaattcttattttctacc

SEQ ID NO: 221 - DNA, 25 bp, Artificial Sequence
  Description of Artificial Sequence: Synthetic oligonucleotide
agagagccaaattcttattttctac

SEQ ID NO: 222 - DNA, 25 bp, Artificial Sequence
  Description of Artificial Sequence: Synthetic oligonucleotide
cagagagccaaattcttattttcta

SEQ ID NO: 223 - DNA, 25 bp, Artificial Sequence
  Description of Artificial Sequence: Synthetic oligonucleotide
acagagagccaaattcttattttct

SEQ ID NO: 224 - DNA, 25 bp, Artificial Sequence
  Description of Artificial Sequence: Synthetic oligonucleotide
cacagagagccaaattcttattttc

SEQ ID NO: 225 - DNA, 25 bp, Artificial Sequence
  Description of Artificial Sequence: Synthetic oligonucleotide
acacagagagccaaattcttatttt

SEQ ID NO: 226 - DNA, 25 bp, Artificial Sequence
  Description of Artificial Sequence: Synthetic oligonucleotide
cacacagagagccaaattcttattt

SEQ ID NO: 227 - DNA, 25 bp, Artificial Sequence
  Description of Artificial Sequence: Synthetic oligonucleotide
tcacacagagagccaaattcttatt

SEQ ID NO: 228 - DNA, 25 bp, Artificial Sequence
  Description of Artificial Sequence: Synthetic oligonucleotide
ctcacacagagagccaaattcttat

SEQ ID NO: 229 - DNA, 25 bp, Artificial Sequence
  Description of Artificial Sequence: Synthetic oligonucleotide
gctcacacagagagccaaattctta

SEQ ID NO: 230 - DNA, 25 bp, Artificial Sequence
  Description of Artificial Sequence: Synthetic oligonucleotide
tgctcacacagagagccaaattctt

SEQ ID NO: 231 - DNA, 25 bp, Artificial Sequence
  Description of Artificial Sequence: Synthetic oligonucleotide
atgctcacacagagagccaaattct

SEQ ID NO: 232 - DNA, 25 bp, Artificial Sequence
  Description of Artificial Sequence: Synthetic oligonucleotide
catgctcacacagagagccaaattc

SEQ ID NO: 233 - DNA, 25 bp, Artificial Sequence
  Description of Artificial Sequence: Synthetic oligonucleotide
acatgctcacacagagagccaaatt

SEQ ID NO: 234 - DNA, 25 bp, Artificial Sequence
  Description of Artificial Sequence: Synthetic oligonucleotide
cacatgctcacacagagagccaaat

SEQ ID NO: 235 - DNA, 25 bp, Artificial Sequence
  Description of Artificial Sequence: Synthetic oligonucleotide
acacatgctcacacagagagccaaa

SEQ ID NO: 236 - DNA, 25 bp, Artificial Sequence
  Description of Artificial Sequence: Synthetic oligonucleotide
cacacatgctcacacagagagccaa

SEQ ID NO: 237 - DNA, 25 bp, Artificial Sequence
  Description of Artificial Sequence: Synthetic oligonucleotide
gcacacatgctcacacagagagcca

SEQ ID NO: 238 - DNA, 25 bp, Artificial Sequence
  Description of Artificial Sequence: Synthetic oligonucleotide
cgcacacatgctcacacagagagcc

SEQ ID NO: 239 - DNA, 25 bp, Artificial Sequence
  Description of Artificial Sequence: Synthetic oligonucleotide
acgcacacatgctcacacagagagc

SEQ ID NO: 240 - DNA, 25 bp, Artificial Sequence
  Description of Artificial Sequence: Synthetic oligonucleotide
cacgcacacatgctcacacagagag

SEQ ID NO: 241 - DNA, 25 bp, Artificial Sequence
  Description of Artificial Sequence: Synthetic oligonucleotide
acacgcacacatgctcacacagaga

SEQ ID NO: 242 - DNA, 25 bp, Artificial Sequence
  Description of Artificial Sequence: Synthetic oligonucleotide
cacacgcacacatgctcacacagag

SEQ ID NO: 243 - DNA, 25 bp, Artificial Sequence
  Description of Artificial Sequence: Synthetic oligonucleotide
acacacgcacacatgctcacacaga

SEQ ID NO: 244 - DNA, 25 bp, Artificial Sequence
  Description of Artificial Sequence: Synthetic oligonucleotide
cacacacgcacacatgctcacacag

SEQ ID NO: 245 - DNA, 25 bp, Artificial Sequence
  Description of Artificial Sequence: Synthetic oligonucleotide
gcacacacgcacacatgctcacaca

SEQ ID NO: 246 - DNA, 25 bp, Artificial Sequence
  Description of Artificial Sequence: Synthetic oligonucleotide
cgcacacacgcacacatgctcacac

SEQ ID NO: 247 - DNA, 25 bp, Artificial Sequence
  Description of Artificial Sequence: Synthetic oligonucleotide
tcgcacacacgcacacatgctcaca

SEQ ID NO: 248 - DNA, 25 bp, Artificial Sequence
  Description of Artificial Sequence: Synthetic oligonucleotide
ctcgcacacacgcacacatgctcac

SEQ ID NO: 249 - DNA, 25 bp, Artificial Sequence
  Description of Artificial Sequence: Synthetic oligonucleotide
tctcgcacacacgcacacatgctca

SEQ ID NO: 250 - DNA, 25 bp, Artificial Sequence
  Description of Artificial Sequence: Synthetic oligonucleotide
ctctcgcacacacgcacacatgctc

SEQ ID NO: 251 - DNA, 25 bp, Artificial Sequence
  Description of Artificial Sequence: Synthetic oligonucleotide
tctctcgcacacacgcacacatgct

SEQ ID NO: 252 - DNA, 25 bp, Artificial Sequence
  Description of Artificial Sequence: Synthetic oligonucleotide
ctctctcgcacacacgcacacatgc

SEQ ID NO: 253 - DNA, 25 bp, Artificial Sequence
  Description of Artificial Sequence: Synthetic oligonucleotide
tctctctcgcacacacgcacacatg

SEQ ID NO: 254 - DNA, 25 bp, Artificial Sequence
  Description of Artificial Sequence: Synthetic oligonucleotide
ctctctctcgcacacacgcacacat

SEQ ID NO: 255 - DNA, 25 bp, Artificial Sequence
  Description of Artificial Sequence: Synthetic oligonucleotide
tctctctctcgcacacacgcacaca

SEQ ID NO: 256 - DNA, 25 bp, Artificial Sequence
  Description of Artificial Sequence: Synthetic oligonucleotide
ctctctctctcgcacacacgcacac

SEQ ID NO: 257 - DNA, 25 bp, Artificial Sequence
  Description of Artificial Sequence: Synthetic oligonucleotide
tctctctctctcgcacacacgcaca

SEQ ID NO: 258 - DNA, 25 bp, Artificial Sequence
  Description of Artificial Sequence: Synthetic oligonucleotide
gtctctctctctcgcacacacgcac

SEQ ID NO: 259 - DNA, 25 bp, Artificial Sequence
  Description of Artificial Sequence: Synthetic oligonucleotide
tgtctctctctctcgcacacacgca

SEQ ID NO: 260 - DNA, 25 bp, Artificial Sequence
  Description of Artificial Sequence: Synthetic oligonucleotide
ctgtctctctctctcgcacacacgc

SEQ ID NO: 261 - DNA, 25 bp, Artificial Sequence
  Description of Artificial Sequence: Synthetic oligonucleotide
tctgtctctctctctcgcacacacg

SEQ ID NO: 262 - DNA, 25 bp, Artificial Sequence
  Description of Artificial Sequence: Synthetic oligonucleotide
gtctgtctctctctctcgcacacac

SEQ ID NO: 263 - DNA, 25 bp, Artificial Sequence
  Description of Artificial Sequence: Synthetic oligonucleotide
tgtctgtctctctctctcgcacaca

SEQ ID NO: 264 - DNA, 25 bp, Artificial Sequence
  Description of Artificial Sequence: Synthetic oligonucleotide
ctgtctgtctctctctctcgcacac

SEQ ID NO: 265 - DNA, 25 bp, Artificial Sequence
  Description of Artificial Sequence: Synthetic oligonucleotide
gctgtctgtctctctctctcgcaca

SEQ ID NO: 266 - DNA, 25 bp, Artificial Sequence
  Description of Artificial Sequence: Synthetic oligonucleotide
ggctgtctgtctctctctctcgcac

SEQ ID NO: 267 - DNA, 25 bp, Artificial Sequence
  Description of Artificial Sequence: Synthetic oligonucleotide
aggctgtctgtctctctctctcgca

SEQ ID NO: 268 - DNA, 25 bp, Artificial Sequence
  Description of Artificial Sequence: Synthetic oligonucleotide
caggctgtctgtctctctctctcgc

SEQ ID NO: 269 - DNA, 25 bp, Artificial Sequence
  Description of Artificial Sequence: Synthetic oligonucleotide
gcaggctgtctgtctctctctctcg

SEQ ID NO: 270 - DNA, 25 bp, Artificial Sequence
  Description of Artificial Sequence: Synthetic oligonucleotide
ggcaggctgtctgtctctctctctc

SEQ ID NO: 271 - DNA, 25 bp, Artificial Sequence
  Description of Artificial Sequence: Synthetic oligonucleotide
aggcaggctgtctgtctctctctct

SEQ ID NO: 272 - DNA, 25 bp, Artificial Sequence
  Description of Artificial Sequence: Synthetic oligonucleotide
taggcaggctgtctgtctctctctc

SEQ ID NO: 273 - DNA, 25 bp, Artificial Sequence
  Description of Artificial Sequence: Synthetic oligonucleotide
ttaggcaggctgtctgtctctctct

SEQ ID NO: 274 - DNA, 25 bp, Artificial Sequence
  Description of Artificial Sequence: Synthetic oligonucleotide
cttaggcaggctgtctgtctctctc

SEQ ID NO: 275 - DNA, 25 bp, Artificial Sequence
  Description of Artificial Sequence: Synthetic oligonucleotide
tcttaggcaggctgtctgtctctct

SEQ ID NO: 276 - DNA, 25 bp, Artificial Sequence
  Description of Artificial Sequence: Synthetic oligonucleotide
ttcttaggcaggctgtctgtctctc

SEQ ID NO: 277 - DNA, 25 bp, Artificial Sequence
  Description of Artificial Sequence: Synthetic oligonucleotide
cttcttaggcaggctgtctgtctct

SEQ ID NO: 278 - DNA, 25 bp, Artificial Sequence
  Description of Artificial Sequence: Synthetic oligonucleotide
tcttcttaggcaggctgtctgtctc

SEQ ID NO: 279 - DNA, 25 bp, Artificial Sequence
  Description of Artificial Sequence: Synthetic oligonucleotide
ttcttcttaggcaggctgtctgtct

SEQ ID NO: 280 - DNA, 25 bp, Artificial Sequence
  Description of Artificial Sequence: Synthetic oligonucleotide
tttcttcttaggcaggctgtctgtc

SEQ ID NO: 281 - DNA, 25 bp, Artificial Sequence
  Description of Artificial Sequence: Synthetic oligonucleotide
atttcttcttaggcaggctgtctgt

SEQ ID NO: 282 - DNA, 25 bp, Artificial Sequence
  Description of Artificial Sequence: Synthetic oligonucleotide
catttcttcttaggcaggctgtctg

SEQ ID NO: 283 - DNA, 25 bp, Artificial Sequence
  Description of Artificial Sequence: Synthetic oligonucleotide
tcatttcttcttaggcaggctgtct

SEQ ID NO: 284 - DNA, 25 bp, Artificial Sequence
  Description of Artificial Sequence: Synthetic oligonucleotide
ttcatttcttcttaggcaggctgtc

SEQ ID NO: 285 - DNA, 25 bp, Artificial Sequence
  Description of Artificial Sequence: Synthetic oligonucleotide
attcatttcttcttaggcaggctgt

SEQ ID NO: 286 - DNA, 25 bp, Artificial Sequence
  Description of Artificial Sequence: Synthetic oligonucleotide
cattcatttcttcttaggcaggctg

SEQ ID NO: 287 - DNA, 25 bp, Artificial Sequence
  Description of Artificial Sequence: Synthetic oligonucleotide
acattcatttcttcttaggcaggct

SEQ ID NO: 288 - DNA, 25 bp, Artificial Sequence
  Description of Artificial Sequence: Synthetic oligonucleotide
cacattcatttcttcttaggcaggc

SEQ ID NO: 289 - DNA, 25 bp, Artificial Sequence
  Description of Artificial Sequence: Synthetic oligonucleotide
tcacattcatttcttcttaggcagg

SEQ ID NO: 290 - DNA, 25 bp, Artificial Sequence
  Description of Artificial Sequence: Synthetic oligonucleotide
ttcacattcatttcttcttaggcag

SEQ ID NO: 291 - DNA, 25 bp, Artificial Sequence
  Description of Artificial Sequence: Synthetic oligonucleotide
attcacattcatttcttcttaggca

SEQ ID NO: 292 - DNA, 25 bp, Artificial Sequence
  Description of Artificial Sequence: Synthetic oligonucleotide
cattcacattcatttcttcttaggc

SEQ ID NO: 293 - DNA, 25 bp, Artificial Sequence
  Description of Artificial Sequence: Synthetic oligonucleotide
gcattcacattcatttcttcttagg

SEQ ID NO: 294 - DNA, 25 bp, Artificial Sequence
  Description of Artificial Sequence: Synthetic oligonucleotide
cgcattcacattcatttcttcttag

SEQ ID NO: 295 - DNA, 25 bp, Artificial Sequence
  Description of Artificial Sequence: Synthetic oligonucleotide
ccgcattcacattcatttcttctta

SEQ ID NO: 296 - DNA, 25 bp, Artificial Sequence
  Description of Artificial Sequence: Synthetic oligonucleotide
gccgcattcacattcatttcttctt

SEQ ID NO: 297 - DNA, 25 bp, Artificial Sequence
  Description of Artificial Sequence: Synthetic oligonucleotide
agccgcattcacattcatttcttct

SEQ ID NO: 298 - DNA, 25 bp, Artificial Sequence
  Description of Artificial Sequence: Synthetic oligonucleotide
aagccgcattcacattcatttcttc

SEQ ID NO: 299 - DNA, 25 bp, Artificial Sequence
  Description of Artificial Sequence: Synthetic oligonucleotide
caagccgcattcacattcatttctt

SEQ ID NO: 300 - DNA, 25 bp, Artificial Sequence
  Description of Artificial Sequence: Synthetic oligonucleotide
acaagccgcattcacattcatttct

SEQ ID NO: 301 - DNA, 25 bp, Artificial Sequence
  Description of Artificial Sequence: Synthetic oligonucleotide
cacaagccgcattcacattcatttc

SEQ ID NO: 302 - DNA, 25 bp, Artificial Sequence
  Description of Artificial Sequence: Synthetic oligonucleotide
ccacaagccgcattcacattcattt

SEQ ID NO: 303 - DNA, 25 bp, Artificial Sequence
  Description of Artificial Sequence: Synthetic oligonucleotide
gccacaagccgcattcacattcatt

SEQ ID NO: 304 - DNA, 25 bp, Artificial Sequence
  Description of Artificial Sequence: Synthetic oligonucleotide
tgccacaagccgcattcacattcat

SEQ ID NO: 305 - DNA, 25 bp, Artificial Sequence
  Description of Artificial Sequence: Synthetic oligonucleotide
gtgccacaagccgcattcacattca

SEQ ID NO: 306 - DNA, 25 bp, Artificial Sequence
  Description of Artificial Sequence: Synthetic oligonucleotide
tgtgccacaagccgcattcacattc

SEQ ID NO: 307 - DNA, 25 bp, Artificial Sequence
  Description of Artificial Sequence: Synthetic oligonucleotide
ctgtgccacaagccgcattcacatt

SEQ ID NO: 308 - DNA, 25 bp, Artificial Sequence
  Description of Artificial Sequence: Synthetic oligonucleotide
actgtgccacaagccgcattcacat

SEQ ID NO: 309 - DNA, 25 bp, Artificial Sequence
  Description of Artificial Sequence: Synthetic oligonucleotide
aactgtgccacaagccgcattcaca

SEQ ID NO: 310 - DNA, 25 bp, Artificial Sequence
  Description of Artificial Sequence: Synthetic oligonucleotide
caactgtgccacaagccgcattcac

SEQ ID NO: 311 - DNA, 25 bp, Artificial Sequence
  Description of Artificial Sequence: Synthetic oligonucleotide
tcaactgtgccacaagccgcattca

SEQ ID NO: 312 - DNA, 25 bp, Artificial Sequence
  Description of Artificial Sequence: Synthetic oligonucleotide
gtcaactgtgccacaagccgcattc

SEQ ID NO: 313 - DNA, 25 bp, Artificial Sequence
  Description of Artificial Sequence: Synthetic oligonucleotide
tgtcaactgtgccacaagccgcatt

SEQ ID NO: 314 - DNA, 25 bp, Artificial Sequence
  Description of Artificial Sequence: Synthetic oligonucleotide
ttgtcaactgtgccacaagccgcat

SEQ ID NO: 315 - DNA, 25 bp, Artificial Sequence
  Description of Artificial Sequence: Synthetic oligonucleotide
cttgtcaactgtgccacaagccgca

SEQ ID NO: 316 - DNA, 25 bp, Artificial Sequence
  Description of Artificial Sequence: Synthetic oligonucleotide
ccttgtcaactgtgccacaagccgc

SEQ ID NO: 317 - DNA, 25 bp, Artificial Sequence
  Description of Artificial Sequence: Synthetic oligonucleotide
tccttgtcaactgtgccacaagccg

SEQ ID NO: 318 - DNA, 25 bp, Artificial Sequence
  Description of Artificial Sequence: Synthetic oligonucleotide
atccttgtcaactgtgccacaagcc

SEQ ID NO: 319 - DNA, 25 bp, Artificial Sequence
  Description of Artificial Sequence: Synthetic oligonucleotide
catccttgtcaactgtgccacaagc

SEQ ID NO: 320 - DNA, 25 bp, Artificial Sequence
  Description of Artificial Sequence: Synthetic oligonucleotide
tcatccttgtcaactgtgccacaag

SEQ ID NO: 321 - DNA, 25 bp, Artificial Sequence
  Description of Artificial Sequence: Synthetic oligonucleotide
atcatccttgtcaactgtgccacaa

SEQ ID NO: 322 - DNA, 25 bp, Artificial Sequence
  Description of Artificial Sequence: Synthetic oligonucleotide
tatcatccttgtcaactgtgccaca

SEQ ID NO: 323 - DNA, 25 bp, Artificial Sequence
  Description of Artificial Sequence: Synthetic oligonucleotide
ttatcatccttgtcaactgtgccac

SEQ ID NO: 324 - DNA, 25 bp, Artificial Sequence
  Description of Artificial Sequence: Synthetic oligonucleotide
tttatcatccttgtcaactgtgcca

SEQ ID NO: 325 - DNA, 25 bp, Artificial Sequence
  Description of Artificial Sequence: Synthetic oligonucleotide
atttatcatccttgtcaactgtgcc

SEQ ID NO: 326 - DNA, 25 bp, Artificial Sequence
  Description of Artificial Sequence: Synthetic oligonucleotide
gatttatcatccttgtcaactgtgc

SEQ ID NO: 327 - DNA, 25 bp, Artificial Sequence
  Description of Artificial Sequence: Synthetic oligonucleotide
tgatttatcatccttgtcaactgtg

SEQ ID NO: 328 - DNA, 25 bp, Artificial Sequence
  Description of Artificial Sequence: Synthetic oligonucleotide
ttgatttatcatccttgtcaactgt

SEQ ID NO: 329 - DNA, 25 bp, Artificial Sequence
  Description of Artificial Sequence: Synthetic oligonucleotide
attgatttatcatccttgtcaactg

SEQ ID NO: 330 - DNA, 25 bp, Artificial Sequence
  Description of Artificial Sequence: Synthetic oligonucleotide
tattgatttatcatccttgtcaact

SEQ ID NO: 331 - DNA, 25 bp, Artificial Sequence
  Description of Artificial Sequence: Synthetic oligonucleotide
ttattgatttatcatccttgtcaac

SEQ ID NO: 332 - DNA, 25 bp, Artificial Sequence
  Description of Artificial Sequence: Synthetic oligonucleotide
attattgatttatcatccttgtcaa

SEQ ID NO: 333 - DNA, 25 bp, Artificial Sequence
  Description of Artificial Sequence: Synthetic oligonucleotide
cattattgatttatcatccttgtca

SEQ ID NO: 334 - DNA, 25 bp, Artificial Sequence
  Description of Artificial Sequence: Synthetic oligonucleotide
gcattattgatttatcatccttgtc

SEQ ID NO: 335 - DNA, 25 bp, Artificial Sequence
  Description of Artificial Sequence: Synthetic oligonucleotide
tgcattattgatttatcatccttgt

SEQ ID NO: 336 - DNA, 25 bp, Artificial Sequence
  Description of Artificial Sequence: Synthetic oligonucleotide
ttgcattattgatttatcatccttg

SEQ ID NO: 337 - DNA, 25 bp, Artificial Sequence
  Description of Artificial Sequence: Synthetic oligonucleotide
cttgcattattgatttatcatcctt

SEQ ID NO: 338 - DNA, 25 bp, Artificial Sequence
  Description of Artificial Sequence: Synthetic oligonucleotide
gcttgcattattgatttatcatcct

SEQ ID NO: 339 - DNA, 25 bp, Artificial Sequence
  Description of Artificial Sequence: Synthetic oligonucleotide
agcttgcattattgatttatcatcc

SEQ ID NO: 340 - DNA, 25 bp, Artificial Sequence
  Description of Artificial Sequence: Synthetic oligonucleotide
aagcttgcattattgatttatcatc

SEQ ID NO: 341 - DNA, 25 bp, Artificial Sequence
  Description of Artificial Sequence: Synthetic oligonucleotide
taagcttgcattattgatttatcat

SEQ ID NO: 342 - DNA, 25 bp, Artificial Sequence
  Description of Artificial Sequence: Synthetic oligonucleotide
gtaagcttgcattattgatttatca

SEQ ID NO: 343 - DNA, 25 bp, Artificial Sequence
  Description of Artificial Sequence: Synthetic oligonucleotide
agtaagcttgcattattgatttatc

SEQ ID NO: 344 - DNA, 25 bp, Artificial Sequence
  Description of Artificial Sequence: Synthetic oligonucleotide
tagtaagcttgcattattgatttat

SEQ ID NO: 345 - DNA, 25 bp, Artificial Sequence
  Description of Artificial Sequence: Synthetic oligonucleotide
atagtaagcttgcattattgattta

SEQ ID NO: 346 - DNA, 25 bp, Artificial Sequence
  Description of Artificial Sequence: Synthetic oligonucleotide
gatagtaagcttgcattattgattt

SEQ ID NO: 347 - DNA, 25 bp, Artificial Sequence
  Description of Artificial Sequence: Synthetic oligonucleotide
tgatagtaagcttgcattattgatt

SEQ ID NO: 348 - DNA, 25 bp, Artificial Sequence
  Description of Artificial Sequence: Synthetic oligonucleotide
atgatagtaagcttgcattattgat

SEQ ID NO: 349 - DNA, 25 bp, Artificial Sequence
  Description of Artificial Sequence: Synthetic oligonucleotide
aatgatagtaagcttgcattattga

SEQ ID NO: 350 - DNA, 25 bp, Artificial Sequence
  Description of Artificial Sequence: Synthetic oligonucleotide
aaatgatagtaagcttgcattattg

SEQ ID NO: 351 - DNA, 25 bp, Artificial Sequence
  Description of Artificial Sequence: Synthetic oligonucleotide
taaatgatagtaagcttgcattatt

SEQ ID NO: 352 - DNA, 25 bp, Artificial Sequence
  Description of Artificial Sequence: Synthetic oligonucleotide
ataaatgatagtaagcttgcattat

SEQ ID NO: 353 - DNA, 25 bp, Artificial Sequence
  Description of Artificial Sequence: Synthetic oligonucleotide
cataaatgatagtaagcttgcatta

SEQ ID NO: 354 - DNA, 25 bp, Artificial Sequence
  Description of Artificial Sequence: Synthetic oligonucleotide
tcataaatgatagtaagcttgcatt

SEQ ID NO: 355 - DNA, 25 bp, Artificial Sequence
  Description of Artificial Sequence: Synthetic oligonucleotide
ttcataaatgatagtaagcttgcat

SEQ ID NO: 356 - DNA, 25 bp, Artificial Sequence
  Description of Artificial Sequence: Synthetic oligonucleotide
attcataaatgatagtaagcttgca

SEQ ID NO: 357 - DNA, 25 bp, Artificial Sequence
  Description of Artificial Sequence: Synthetic oligonucleotide
tattcataaatgatagtaagcttgc

SEQ ID NO: 358 - DNA, 25 bp, Artificial Sequence
  Description of Artificial Sequence: Synthetic oligonucleotide
ctattcataaatgatagtaagcttg

SEQ ID NO: 359 - DNA, 25 bp, Artificial Sequence
  Description of Artificial Sequence: Synthetic oligonucleotide
gctattcataaatgatagtaagctt

SEQ ID NO: 360 - DNA, 25 bp, Artificial Sequence
  Description of Artificial Sequence: Synthetic oligonucleotide
tgctattcataaatgatagtaagct

SEQ ID NO: 361 - DNA, 25 bp, Artificial Sequence
  Description of Artificial Sequence: Synthetic oligonucleotide
ttgctattcataaatgatagtaagc

SEQ ID NO: 362 - DNA, 25 bp, Artificial Sequence
  Description of Artificial Sequence: Synthetic oligonucleotide
attgctattcataaatgatagtaag

SEQ ID NO: 363 - DNA, 25 bp, Artificial Sequence
  Description of Artificial Sequence: Synthetic oligonucleotide
tattgctattcataaatgatagtaa

SEQ ID NO: 364 - DNA, 25 bp, Artificial Sequence
  Description of Artificial Sequence: Synthetic oligonucleotide
gtattgctattcataaatgatagta

SEQ ID NO: 365 - DNA, 25 bp, Artificial Sequence
  Description of Artificial Sequence: Synthetic oligonucleotide
agtattgctattcataaatgatagt

SEQ ID NO: 366 - DNA, 25 bp, Artificial Sequence
  Description of Artificial Sequence: Synthetic oligonucleotide
cagtattgctattcataaatgatag

SEQ ID NO: 367 - DNA, 25 bp, Artificial Sequence
  Description of Artificial Sequence: Synthetic oligonucleotide
tcagtattgctattcataaatgata

SEQ ID NO: 368 - DNA, 25 bp, Artificial Sequence
  Description of Artificial Sequence: Synthetic oligonucleotide
ttcagtattgctattcataaatgat

SEQ ID NO: 369 - DNA, 25 bp, Artificial Sequence
  Description of Artificial Sequence: Synthetic oligonucleotide
cttcagtattgctattcataaatga

SEQ ID NO: 370 - DNA, 25 bp, Artificial Sequence
  Description of Artificial Sequence: Synthetic oligonucleotide
tcttcagtattgctattcataaatg

SEQ ID NO: 371 - DNA, 25 bp, Artificial Sequence
  Description of Artificial Sequence: Synthetic oligonucleotide
ttcttcagtattgctattcataaat

SEQ ID NO: 372 - DNA, 25 bp, Artificial Sequence
  Description of Artificial Sequence: Synthetic oligonucleotide
tttcttcagtattgctattcataaa

SEQ ID NO: 373 - DNA, 25 bp, Artificial Sequence
  Description of Artificial Sequence: Synthetic oligonucleotide
atttcttcagtattgctattcataa

SEQ ID NO: 374 - DNA, 25 bp, Artificial Sequence
  Description of Artificial Sequence: Synthetic oligonucleotide
aatttcttcagtattgctattcata

SEQ ID NO: 375 - DNA, 25 bp, Artificial Sequence
  Description of Artificial Sequence: Synthetic oligonucleotide
taatttcttcagtattgctattcat

SEQ ID NO: 376 - DNA, 25 bp, Artificial Sequence
  Description of Artificial Sequence: Synthetic oligonucleotide
ttaatttcttcagtattgctattca

SEQ ID NO: 377 - DNA, 25 bp, Artificial Sequence
  Description of Artificial Sequence: Synthetic oligonucleotide
tttaatttcttcagtattgctattc

SEQ ID NO: 378 - DNA, 25 bp, Artificial Sequence
  Description of Artificial Sequence: Synthetic oligonucleotide
ttttaatttcttcagtattgctatt

SEQ ID NO: 379 - DNA, 25 bp, Artificial Sequence
  Description of Artificial Sequence: Synthetic oligonucleotide
gttttaatttcttcagtattgctat

SEQ ID NO: 380 - DNA, 25 bp, Artificial Sequence
  Description of Artificial Sequence: Synthetic oligonucleotide
tgttttaatttcttcagtattgcta

SEQ ID NO: 381 - DNA, 25 bp, Artificial Sequence
  Description of Artificial Sequence: Synthetic oligonucleotide
ttgttttaatttcttcagtattgct

SEQ ID NO: 382 - DNA, 25 bp, Artificial Sequence
  Description of Artificial Sequence: Synthetic oligonucleotide
tttgttttaatttcttcagtattgc

SEQ ID NO: 383 - DNA, 25 bp, Artificial Sequence
  Description of Artificial Sequence: Synthetic oligonucleotide
ttttgttttaatttcttcagtattg

SEQ ID NO: 384 - DNA, 25 bp, Artificial Sequence
  Description of Artificial Sequence: Synthetic oligonucleotide
cttttgttttaatttcttcagtatt

SEQ ID NO: 385 - DNA, 25 bp, Artificial Sequence
  Description of Artificial Sequence: Synthetic oligonucleotide
tcttttgttttaatttcttcagtat

SEQ ID NO: 386 - DNA, 25 bp, Artificial Sequence
  Description of Artificial Sequence: Synthetic oligonucleotide
atcttttgttttaatttcttcagta

SEQ ID NO: 387 - DNA, 25 bp, Artificial Sequence
  Description of Artificial Sequence: Synthetic oligonucleotide
aatcttttgttttaatttcttcagt

SEQ ID NO: 388 - DNA, 25 bp, Artificial Sequence
  Description of Artificial Sequence: Synthetic oligonucleotide
caatcttttgttttaatttcttcag

SEQ ID NO: 389 - DNA, 25 bp, Artificial Sequence
  Description of Artificial Sequence: Synthetic oligonucleotide
gcaatcttttgttttaatttcttca

SEQ ID NO: 390 - DNA, 25 bp, Artificial Sequence
  Description of Artificial Sequence: Synthetic oligonucleotide
agcaatcttttgttttaatttcttc

SEQ ID NO: 391 - DNA, 25 bp, Artificial Sequence
  Description of Artificial Sequence: Synthetic oligonucleotide
cagcaatcttttgttttaatttctt

SEQ ID NO: 392 - DNA, 25 bp, Artificial Sequence
  Description of Artificial Sequence: Synthetic oligonucleotide
acagcaatcttttgttttaatttct

SEQ ID NO: 393 - DNA, 25 bp, Artificial Sequence
  Description of Artificial Sequence: Synthetic oligonucleotide
gacagcaatcttttgttttaatttc

SEQ ID NO: 394 - DNA, 25 bp, Artificial Sequence
  Description of Artificial Sequence: Synthetic oligonucleotide
agacagcaatcttttgttttaattt

SEQ ID NO: 395 - DNA, 25 bp, Artificial Sequence
  Description of Artificial Sequence: Synthetic oligonucleotide
gagacagcaatcttttgttttaatt

SEQ ID NO: 396 - DNA, 25 bp, Artificial Sequence
  Description of Artificial Sequence: Synthetic oligonucleotide
tgagacagcaatcttttgttttaat

SEQ ID NO: 397 - DNA, 25 bp, Artificial Sequence
  Description of Artificial Sequence: Synthetic oligonucleotide
ttgagacagcaatcttttgttttaa

SEQ ID NO: 398 - DNA, 25 bp, Artificial Sequence
  Description of Artificial Sequence: Synthetic oligonucleotide
attgagacagcaatcttttgtttta

SEQ ID NO: 399 - DNA, 25 bp, Artificial Sequence
  Description of Artificial Sequence: Synthetic oligonucleotide
tattgagacagcaatcttttgtttt

SEQ ID NO: 400 - DNA, 25 bp, Artificial Sequence
  Description of Artificial Sequence: Synthetic oligonucleotide
atattgagacagcaatcttttgttt

SEQ ID NO: 401 - DNA, 25 bp, Artificial Sequence
  Description of Artificial Sequence: Synthetic oligonucleotide
tatattgagacagcaatcttttgtt

SEQ ID NO: 402 - DNA, 25 bp, Artificial Sequence
  Description of Artificial Sequence: Synthetic oligonucleotide
atatattgagacagcaatcttttgt

SEQ ID NO: 403 - DNA, 25 bp, Artificial Sequence
  Description of Artificial Sequence: Synthetic oligonucleotide
gatatattgagacagcaatcttttg

SEQ ID NO: 404 - DNA, 25 bp, Artificial Sequence
  Description of Artificial Sequence: Synthetic oligonucleotide
agatatattgagacagcaatctttt

SEQ ID NO: 405 - DNA, 25 bp, Artificial Sequence
  Description of Artificial Sequence: Synthetic oligonucleotide
aagatatattgagacagcaatcttt

SEQ ID NO: 406 - DNA, 25 bp, Artificial Sequence
  Description of Artificial Sequence: Synthetic oligonucleotide
taagatatattgagacagcaatctt

SEQ ID NO: 407 - DNA, 25 bp, Artificial Sequence
  Description of Artificial Sequence: Synthetic oligonucleotide
ataagatatattgagacagcaatct

SEQ ID NO: 408 - DNA, 25 bp, Artificial Sequence
  Description of Artificial Sequence: Synthetic oligonucleotide
tataagatatattgagacagcaatc

SEQ ID NO: 409 - DNA, 25 bp, Artificial Sequence
  Description of Artificial Sequence: Synthetic oligonucleotide
atataagatatattgagacagcaat

SEQ ID NO: 410 - DNA, 25 bp, Artificial Sequence
  Description of Artificial Sequence: Synthetic oligonucleotide
aatataagatatattgagacagcaa

SEQ ID NO: 411 - DNA, 25 bp, Artificial Sequence
  Description of Artificial Sequence: Synthetic oligonucleotide
aaatataagatatattgagacagca

SEQ ID NO: 412 - DNA, 25 bp, Artificial Sequence
  Description of Artificial Sequence: Synthetic oligonucleotide
taaatataagatatattgagacagc

SEQ ID NO: 413 - DNA, 25 bp, Artificial Sequence
  Description of Artificial Sequence: Synthetic oligonucleotide
ataaatataagatatattgagacag

SEQ ID NO: 414 - DNA, 25 bp, Artificial Sequence
  Description of Artificial Sequence: Synthetic oligonucleotide
aataaatataagatatattgagaca

SEQ ID NO: 415 - DNA, 25 bp, Artificial Sequence
  Description of Artificial Sequence: Synthetic oligonucleotide
taataaatataagatatattgagac

SEQ ID NO: 416 - DNA, 25 bp, Artificial Sequence
  Description of Artificial Sequence: Synthetic oligonucleotide
ataataaatataagatatattgaga

SEQ ID NO: 417 - DNA, 25 bp, Artificial Sequence
  Description of Artificial Sequence: Synthetic oligonucleotide
aataataaatataagatatattgag

SEQ ID NO: 418 - DNA, 25 bp, Artificial Sequence
  Description of Artificial Sequence: Synthetic oligonucleotide
aaataataaatataagatatattga

SEQ ID NO: 419 - DNA, 25 bp, Artificial Sequence
  Description of Artificial Sequence: Synthetic oligonucleotide
taaataataaatataagatatattg

SEQ ID NO: 420 - DNA, 25 bp, Artificial Sequence
  Description of Artificial Sequence: Synthetic oligonucleotide
gtaaataataaatataagatatatt

SEQ ID NO: 421 - DNA, 25 bp, Artificial Sequence
  Description of Artificial Sequence: Synthetic oligonucleotide
ggtaaataataaatataagatatat

SEQ ID NO: 422 - DNA, 25 bp, Artificial Sequence
  Description of Artificial Sequence: Synthetic oligonucleotide
tggtaaataataaatataagatata

SEQ ID NO: 423 - DNA, 25 bp, Artificial Sequence
  Description of Artificial Sequence: Synthetic oligonucleotide
ttggtaaataataaatataagatat

SEQ ID NO: 424 - DNA, 25 bp, Artificial Sequence
  Description of Artificial Sequence: Synthetic oligonucleotide
tttggtaaataataaatataagata

SEQ ID NO: 425 - DNA, 25 bp, Artificial Sequence
  Description of Artificial Sequence: Synthetic oligonucleotide
atttggtaaataataaatataagat

SEQ ID NO: 426 - DNA, 25 bp, Artificial Sequence
  Description of Artificial Sequence: Synthetic oligonucleotide
aatttggtaaataataaatataaga

SEQ ID NO: 427 - DNA, 25 bp, Artificial Sequence
  Description of Artificial Sequence: Synthetic oligonucleotide
taatttggtaaataataaatataag

SEQ ID NO: 428 - DNA, 25 bp, Artificial Sequence
  Description of Artificial Sequence: Synthetic oligonucleotide
ataatttggtaaataataaatataa

SEQ ID NO: 429 - DNA, 25 bp, Artificial Sequence
  Description of Artificial Sequence: Synthetic oligonucleotide
aataatttggtaaataataaatata

SEQ ID NO: 430 - DNA, 25 bp, Artificial Sequence
  Description of Artificial Sequence: Synthetic oligonucleotide
gaataatttggtaaataataaatat

SEQ ID NO: 431 - DNA, 25 bp, Artificial Sequence
  Description of Artificial Sequence: Synthetic oligonucleotide
agaataatttggtaaataataaata

SEQ ID NO: 432 - DNA, 25 bp, Artificial Sequence
  Description of Artificial Sequence: Synthetic oligonucleotide
tagaataatttggtaaataataaat

SEQ ID NO: 433 - DNA, 25 bp, Artificial Sequence
  Description of Artificial Sequence: Synthetic oligonucleotide
ttagaataatttggtaaataataaa

SEQ ID NO: 434 - DNA, 25 bp, Artificial Sequence
  Description of Artificial Sequence: Synthetic oligonucleotide
cttagaataatttggtaaataataa

SEQ ID NO: 435 - DNA, 25 bp, Artificial Sequence
  Description of Artificial Sequence: Synthetic oligonucleotide
tcttagaataatttggtaaataata

SEQ ID NO: 436 - DNA, 25 bp, Artificial Sequence
  Description of Artificial Sequence: Synthetic oligonucleotide
ctcttagaataatttggtaaataat

SEQ ID NO: 437 - DNA, 25 bp, Artificial Sequence
  Description of Artificial Sequence: Synthetic oligonucleotide
actcttagaataatttggtaaataa

SEQ ID NO: 438 - DNA, 25 bp, Artificial Sequence
  Description of Artificial Sequence: Synthetic oligonucleotide
tactcttagaataatttggtaaata

SEQ ID NO: 439 - DNA, 25 bp, Artificial Sequence
  Description of Artificial Sequence: Synthetic oligonucleotide
atactcttagaataatttggtaaat

SEQ ID NO: 440 - DNA, 25 bp, Artificial Sequence
  Description of Artificial Sequence: Synthetic oligonucleotide
aatactcttagaataatttggtaaa

SEQ ID NO: 441 - DNA, 25 bp, Artificial Sequence
  Description of Artificial Sequence: Synthetic oligonucleotide
aaatactcttagaataatttggtaa

SEQ ID NO: 442 - DNA, 25 bp, Artificial Sequence
  Description of Artificial Sequence: Synthetic oligonucleotide
gaaatactcttagaataatttggta

SEQ ID NO: 443 - DNA, 25 bp, Artificial Sequence
  Description of Artificial Sequence: Synthetic oligonucleotide
agaaatactcttagaataatttggt

SEQ ID NO: 444 - DNA, 25 bp, Artificial Sequence
  Description of Artificial Sequence: Synthetic oligonucleotide
aagaaatactcttagaataatttgg

SEQ ID NO: 445 - DNA, 25 bp, Artificial Sequence
  Description of Artificial Sequence: Synthetic oligonucleotide
gaagaaatactcttagaataatttg

SEQ ID NO: 446 - DNA, 25 bp, Artificial Sequence
  Description of Artificial Sequence: Synthetic oligonucleotide
ggaagaaatactcttagaataattt

SEQ ID NO: 447 - DNA, 25 bp, Unknown
  Description of Unknown: target sequence
acttgtaatatacaggtatccctcc

SEQ ID NO: 448 - DNA, 25 bp, Unknown
  Description of Unknown: target sequence
cttgtaatatacaggtatccctcct

SEQ ID NO: 449 - DNA, 25 bp, Unknown
  Description of Unknown: target sequence
ttgtaatatacaggtatccctcctg

SEQ ID NO: 450 - DNA, 25 bp, Unknown
  Description of Unknown: target sequence
tgtaatatacaggtatccctcctgg

SEQ ID NO: 451 - DNA, 25 bp, Unknown
  Description of Unknown: target sequence
gtaatatacaggtatccctcctggt

SEQ ID NO: 452 - DNA, 25 bp, Unknown
  Description of Unknown: target sequence
taatatacaggtatccctcctggta

SEQ ID NO: 453 - DNA, 25 bp, Unknown
  Description of Unknown: target sequence
aatatacaggtatccctcctggtaa

SEQ ID NO: 454 - DNA, 25 bp, Unknown
  Description of Unknown: target sequence
atatacaggtatccctcctggtaag

SEQ ID NO: 455 - DNA, 25 bp, Unknown
  Description of Unknown: target sequence
tatacaggtatccctcctggtaagc

SEQ ID NO: 456 - DNA, 25 bp, Unknown
  Description of Unknown: target sequence
atacaggtatccctcctggtaagct

SEQ ID NO: 457 - DNA, 25 bp, Unknown
  Description of Unknown: target sequence
tacaggtatccctcctggtaagctc

SEQ ID NO: 458 - DNA, 25 bp, Unknown
  Description of Unknown: target sequence
acaggtatccctcctggtaagctct

SEQ ID NO: 459 - DNA, 25 bp, Unknown
  Description of Unknown: target sequence
caggtatccctcctggtaagctctg

SEQ ID NO: 460 - DNA, 25 bp, Unknown
  Description of Unknown: target sequence
aggtatccctcctggtaagctctgg

SEQ ID NO: 461 - DNA, 25 bp, Unknown
  Description of Unknown: target sequence
ggtatccctcctggtaagctctggt

SEQ ID NO: 462 - DNA, 25 bp, Unknown
  Description of Unknown: target sequence
gtatccctcctggtaagctctggta

SEQ ID NO: 463 - DNA, 25 bp, Unknown
  Description of Unknown: target sequence
tatccctcctggtaagctctggtat

SEQ ID NO: 464 - DNA, 25 bp, Unknown
  Description of Unknown: target sequence
atccctcctggtaagctctggtatt

SEQ ID NO: 465 - DNA, 25 bp, Unknown
  Description of Unknown: target sequence
tccctcctggtaagctctggtatta

SEQ ID NO: 466 - DNA, 25 bp, Unknown
  Description of Unknown: target sequence
ccctcctggtaagctctggtattat

SEQ ID NO: 467 - DNA, 25 bp, Unknown
  Description of Unknown: target sequence
cctcctggtaagctctggtattatg

SEQ ID NO: 468 - DNA, 25 bp, Unknown
  Description of Unknown: target sequence
ctcctggtaagctctggtattatgt

SEQ ID NO: 469 - DNA, 25 bp, Unknown
  Description of Unknown: target sequence
tcctggtaagctctggtattatgtc

SEQ ID NO: 470 - DNA, 25 bp, Unknown
  Description of Unknown: target sequence
cctggtaagctctggtattatgtct

SEQ ID NO: 471 - DNA, 25 bp, Unknown
  Description of Unknown: target sequence
ctggtaagctctggtattatgtctt

SEQ ID NO: 472 - DNA, 25 bp, Unknown
  Description of Unknown: target sequence
tggtaagctctggtattatgtctta

SEQ ID NO: 473 - DNA, 25 bp, Unknown
  Description of Unknown: target sequence
ggtaagctctggtattatgtcttaa

SEQ ID NO: 474 - DNA, 25 bp, Unknown
  Description of Unknown: target sequence
gtaagctctggtattatgtcttaac

SEQ ID NO: 475 - DNA, 25 bp, Unknown
  Description of Unknown: target sequence
taagctctggtattatgtcttaaca

SEQ ID NO: 476 - DNA, 25 bp, Unknown
  Description of Unknown: target sequence
aagctctggtattatgtcttaacat

SEQ ID NO: 477 - DNA, 25 bp, Unknown
  Description of Unknown: target sequence
agctctggtattatgtcttaacatt

SEQ ID NO: 478 - DNA, 25 bp, Unknown
  Description of Unknown: target sequence
gctctggtattatgtcttaacattt

SEQ ID NO: 479 - DNA, 25 bp, Unknown
  Description of Unknown: target sequence
ctctggtattatgtcttaacatttt

SEQ ID NO: 480 - DNA, 25 bp, Unknown
  Description of Unknown: target sequence
tctggtattatgtcttaacattttt

SEQ ID NO: 481 - DNA, 25 bp, Unknown
  Description of Unknown: target sequence
ctggtattatgtcttaacattttta

SEQ ID NO: 482 - DNA, 25 bp, Unknown
  Description of Unknown: target sequence
tggtattatgtcttaacatttttaa

SEQ ID NO: 483 - DNA, 25 bp, Unknown
  Description of Unknown: target sequence
ggtattatgtcttaacatttttaaa

SEQ ID NO: 484 - DNA, 25 bp, Unknown
  Description of Unknown: target sequence
gtattatgtcttaacatttttaaat

SEQ ID NO: 485 - DNA, 25 bp, Unknown
  Description of Unknown: target sequence
tattatgtcttaacatttttaaatc

SEQ ID NO: 486 - DNA, 25 bp, Unknown
  Description of Unknown: target sequence
attatgtcttaacatttttaaatct

SEQ ID NO: 487 - DNA, 25 bp, Unknown
  Description of Unknown: target sequence
ttatgtcttaacatttttaaatcta

SEQ ID NO: 488 - DNA, 25 bp, Unknown
  Description of Unknown: target sequence
tatgtcttaacatttttaaatctat

SEQ ID NO: 489 - DNA, 25 bp, Unknown
  Description of Unknown: target sequence
atgtcttaacatttttaaatctatg

SEQ ID NO: 490 - DNA, 25 bp, Unknown
  Description of Unknown: target sequence
tgtcttaacatttttaaatctatgg

SEQ ID NO: 491 - DNA, 25 bp, Unknown
  Description of Unknown: target sequence
gtcttaacatttttaaatctatggt

SEQ ID NO: 492 - DNA, 25 bp, Unknown
  Description of Unknown: target sequence
tcttaacatttttaaatctatggta

SEQ ID NO: 493 - DNA, 25 bp, Unknown
  Description of Unknown: target sequence
cttaacatttttaaatctatggtaa

SEQ ID NO: 494 - DNA, 25 bp, Unknown
  Description of Unknown: target sequence
ttaacatttttaaatctatggtaat

SEQ ID NO: 495 - DNA, 25 bp, Unknown
  Description of Unknown: target sequence
taacatttttaaatctatggtaatc

SEQ ID NO: 496 - DNA, 25 bp, Unknown
  Description of Unknown: target sequence
aacatttttaaatctatggtaatct

SEQ ID NO: 497 - DNA, 25 bp, Unknown
  Description of Unknown: target sequence
acatttttaaatctatggtaatctt

SEQ ID NO: 498 - DNA, 25 bp, Unknown
  Description of Unknown: target sequence
catttttaaatctatggtaatcttt

SEQ ID NO: 499 - DNA, 25 bp, Unknown
  Description of Unknown: target sequence
atttttaaatctatggtaatcttta

SEQ ID NO: 500 - DNA, 25 bp, Unknown
  Description of Unknown: target sequence
tttttaaatctatggtaatctttac

SEQ ID NO: 501 - DNA, 25 bp, Unknown
  Description of Unknown: target sequence
ttttaaatctatggtaatctttaca

SEQ ID NO: 502 - DNA, 25 bp, Unknown
  Description of Unknown: target sequence
tttaaatctatggtaatctttacaa

SEQ ID NO: 503 - DNA, 25 bp, Unknown
  Description of Unknown: target sequence
ttaaatctatggtaatctttacaaa

SEQ ID NO: 504 - DNA, 25 bp, Unknown
  Description of Unknown: target sequence
taaatctatggtaatctttacaaaa

SEQ ID NO: 505 - DNA, 25 bp, Unknown
  Description of Unknown: target sequence
aaatctatggtaatctttacaaaat

SEQ ID NO: 506 - DNA, 25 bp, Unknown
  Description of Unknown: target sequence
aatctatggtaatctttacaaaata

SEQ ID NO: 507 - DNA, 25 bp, Unknown
  Description of Unknown: target sequence
atctatggtaatctttacaaaatat

SEQ ID NO: 508 - DNA, 25 bp, Unknown
  Description of Unknown: target sequence
tctatggtaatctttacaaaatatt

SEQ ID NO: 509 - DNA, 25 bp, Unknown
  Description of Unknown: target sequence
ctatggtaatctttacaaaatattt

SEQ ID NO: 510 - DNA, 25 bp, Unknown
  Description of Unknown: target sequence
tatggtaatctttacaaaatatttt

SEQ ID NO: 511 - DNA, 25 bp, Unknown
  Description of Unknown: target sequence
atggtaatctttacaaaatatttta

SEQ ID NO: 512 - DNA, 25 bp, Unknown
  Description of Unknown: target sequence
tggtaatctttacaaaatattttac

SEQ ID NO: 513 - DNA, 25 bp, Unknown
  Description of Unknown: target sequence
ggtaatctttacaaaatattttact

SEQ ID NO: 514 - DNA, 25 bp, Unknown
  Description of Unknown: target sequence
gtaatctttacaaaatattttactt

SEQ ID NO: 515 - DNA, 25 bp, Unknown
  Description of Unknown: target sequence
taatctttacaaaatattttacttc

SEQ ID NO: 516 - DNA, 25 bp, Unknown
  Description of Unknown: target sequence
aatctttacaaaatattttacttcc

SEQ ID NO: 517 - DNA, 25 bp, Unknown
  Description of Unknown: target sequence
atctttacaaaatattttacttccg

SEQ ID NO: 518 - DNA, 25 bp, Unknown
  Description of Unknown: target sequence
tctttacaaaatattttacttccga

SEQ ID NO: 519 - DNA, 25 bp, Unknown
  Description of Unknown: target sequence
ctttacaaaatattttacttccgaa

SEQ ID NO: 520 - DNA, 25 bp, Unknown
  Description of Unknown: target sequence
tttacaaaatattttacttccgaac

SEQ ID NO: 521 - DNA, 25 bp, Unknown
  Description of Unknown: target sequence
ttacaaaatattttacttccgaact

SEQ ID NO: 522 - DNA, 25 bp, Unknown
  Description of Unknown: target sequence
tacaaaatattttacttccgaactc

SEQ ID NO: 523 - DNA, 25 bp, Unknown
  Description of Unknown: target sequence
acaaaatattttacttccgaactca

SEQ ID NO: 524 - DNA, 25 bp, Unknown
  Description of Unknown: target sequence
caaaatattttacttccgaactcat

SEQ ID NO: 525 - DNA, 25 bp, Unknown
  Description of Unknown: target sequence
aaaatattttacttccgaactcata

SEQ ID NO: 526 - DNA, 25 bp, Unknown
  Description of Unknown: target sequence
aaatattttacttccgaactcatat

SEQ ID NO: 527 - DNA, 25 bp, Unknown
  Description of Unknown: target sequence
aatattttacttccgaactcatata

SEQ ID NO: 528 - DNA, 25 bp, Unknown
  Description of Unknown: target sequence
atattttacttccgaactcatatac

SEQ ID NO: 529 - DNA, 25 bp, Unknown
  Description of Unknown: target sequence
tattttacttccgaactcatatacc

SEQ ID NO: 530 - DNA, 25 bp, Unknown
  Description of Unknown: target sequence
attttacttccgaactcatatacct

SEQ ID NO: 531 - DNA, 25 bp, Unknown
  Description of Unknown: target sequence
ttttacttccgaactcatatacctg

SEQ ID NO: 532 - DNA, 25 bp, Unknown
  Description of Unknown: target sequence
tttacttccgaactcatatacctgg

SEQ ID NO: 533 - DNA, 25 bp, Unknown
  Description of Unknown: target sequence
ttacttccgaactcatatacctggg

SEQ ID NO: 534 - DNA, 25 bp, Unknown
  Description of Unknown: target sequence
tacttccgaactcatatacctgggg

SEQ ID NO: 535 - DNA, 25 bp, Unknown
  Description of Unknown: target sequence
acttccgaactcatatacctgggga

SEQ ID NO: 536 - DNA, 25 bp, Unknown
  Description of Unknown: target sequence
cttccgaactcatatacctggggat

SEQ ID NO: 537 - DNA, 25 bp, Unknown
  Description of Unknown: target sequence
ttccgaactcatatacctggggatt

SEQ ID NO: 538 - DNA, 25 bp, Unknown
  Description of Unknown: target sequence
tccgaactcatatacctggggattt

SEQ ID NO: 539 - DNA, 25 bp, Unknown
  Description of Unknown: target sequence
ccgaactcatatacctggggatttt

SEQ ID NO: 540 - DNA, 25 bp, Unknown
  Description of Unknown: target sequence
cgaactcatatacctggggatttta

SEQ ID NO: 541 - DNA, 25 bp, Unknown
  Description of Unknown: target sequence
gaactcatatacctggggattttat

SEQ ID NO: 542 - DNA, 25 bp, Unknown
  Description of Unknown: target sequence
aactcatatacctggggattttatt

SEQ ID NO: 543 - DNA, 25 bp, Unknown
  Description of Unknown: target sequence
actcatatacctggggattttatta

SEQ ID NO: 544 - DNA, 25 bp, Unknown
  Description of Unknown: target sequence
ctcatatacctggggattttattac

SEQ ID NO: 545 - DNA, 25 bp, Unknown
  Description of Unknown: target sequence
tcatatacctggggattttattact

SEQ ID NO: 546 - DNA, 25 bp, Unknown
  Description of Unknown: target sequence
catatacctggggattttattactc

SEQ ID NO: 547 - DNA, 25 bp, Unknown
  Description of Unknown: target sequence
atatacctggggattttattactct

SEQ ID NO: 548 - DNA, 25 bp, Unknown
  Description of Unknown: target sequence
tatacctggggattttattactctg

SEQ ID NO: 549 - DNA, 25 bp, Unknown
  Description of Unknown: target sequence
atacctggggattttattactctgg

SEQ ID NO: 550 - DNA, 25 bp, Unknown
  Description of Unknown: target sequence
tacctggggattttattactctggg

SEQ ID NO: 551 - DNA, 25 bp, Unknown
  Description of Unknown: target sequence
acctggggattttattactctggga

SEQ ID NO: 552 - DNA, 25 bp, Unknown
  Description of Unknown: target sequence
cctggggattttattactctgggaa

SEQ ID NO: 553 - DNA, 25 bp, Unknown
  Description of Unknown: target sequence
ctggggattttattactctgggaat

SEQ ID NO: 554 - DNA, 25 bp, Unknown
  Description of Unknown: target sequence
tggggattttattactctgggaatt

SEQ ID NO: 555 - DNA, 25 bp, Unknown
  Description of Unknown: target sequence
ggggattttattactctgggaatta

SEQ ID NO: 556 - DNA, 25 bp, Unknown
  Description of Unknown: target sequence
gggattttattactctgggaattat

SEQ ID NO: 557 - DNA, 25 bp, Unknown
  Description of Unknown: target sequence
ggattttattactctgggaattatg

SEQ ID NO: 558 - DNA, 25 bp, Unknown
  Description of Unknown: target sequence
gattttattactctgggaattatgt

SEQ ID NO: 559 - DNA, 25 bp, Unknown
  Description of Unknown: target sequence
attttattactctgggaattatgtg

SEQ ID NO: 560 - DNA, 25 bp, Unknown
  Description of Unknown: target sequence
ttttattactctgggaattatgtgt

SEQ ID NO: 561 - DNA, 25 bp, Unknown
  Description of Unknown: target sequence
tttattactctgggaattatgtgtt

SEQ ID NO: 562 - DNA, 25 bp, Unknown
  Description of Unknown: target sequence
ttattactctgggaattatgtgttc

SEQ ID NO: 563 - DNA, 25 bp, Unknown
  Description of Unknown: target sequence
tattactctgggaattatgtgttct

SEQ ID NO: 564 - DNA, 25 bp, Unknown
  Description of Unknown: target sequence
attactctgggaattatgtgttctg

SEQ ID NO: 565 - DNA, 25 bp, Unknown
  Description of Unknown: target sequence
ttactctgggaattatgtgttctgc

SEQ ID NO: 566 - DNA, 25 bp, Unknown
  Description of Unknown: target sequence
tactctgggaattatgtgttctgcc

SEQ ID NO: 567 - DNA, 25 bp, Unknown
  Description of Unknown: target sequence
actctgggaattatgtgttctgccc

SEQ ID NO: 568 - DNA, 25 bp, Unknown
  Description of Unknown: target sequence
ctctgggaattatgtgttctgcccc

SEQ ID NO: 569 - DNA, 25 bp, Unknown
  Description of Unknown: target sequence
tctgggaattatgtgttctgcccca

SEQ ID NO: 570 - DNA, 25 bp, Unknown
  Description of Unknown: target sequence
ctgggaattatgtgttctgccccat

SEQ ID NO: 571 - DNA, 25 bp, Unknown
  Description of Unknown: target sequence
tgggaattatgtgttctgccccatc

SEQ ID NO: 572 - DNA, 25 bp, Unknown
  Description of Unknown: target sequence
gggaattatgtgttctgccccatca

SEQ ID NO: 573 - DNA, 25 bp, Unknown
  Description of Unknown: target sequence
ggaattatgtgttctgccccatcac

SEQ ID NO: 574 - DNA, 25 bp, Unknown
  Description of Unknown: target sequence
gaattatgtgttctgccccatcact

SEQ ID NO: 575 - DNA, 25 bp, Unknown
  Description of Unknown: target sequence
aattatgtgttctgccccatcactc

SEQ ID NO: 576 - DNA, 25 bp, Unknown
  Description of Unknown: target sequence
attatgtgttctgccccatcactct

SEQ ID NO: 577 - DNA, 25 bp, Unknown
  Description of Unknown: target sequence
ttatgtgttctgccccatcactctc

SEQ ID NO: 578 - DNA, 25 bp, Unknown
  Description of Unknown: target sequence
tatgtgttctgccccatcactctct

SEQ ID NO: 579 - DNA, 25 bp, Unknown
  Description of Unknown: target sequence
atgtgttctgccccatcactctctc

SEQ ID NO: 580 - DNA, 25 bp, Unknown
  Description of Unknown: target sequence
tgtgttctgccccatcactctctct

SEQ ID NO: 581 - DNA, 25 bp, Unknown
  Description of Unknown: target sequence
gtgttctgccccatcactctctctt

SEQ ID NO: 582 - DNA, 25 bp, Unknown
  Description of Unknown: target sequence
tgttctgccccatcactctctctta

SEQ ID NO: 583 - DNA, 25 bp, Unknown
  Description of Unknown: target sequence
gttctgccccatcactctctcttaa

SEQ ID NO: 584 - DNA, 25 bp, Unknown
  Description of Unknown: target sequence
ttctgccccatcactctctcttaat

SEQ ID NO: 585 - DNA, 25 bp, Unknown
  Description of Unknown: target sequence
tctgccccatcactctctcttaatt

SEQ ID NO: 586 - DNA, 25 bp, Unknown
  Description of Unknown: target sequence
ctgccccatcactctctcttaattg

SEQ ID NO: 587 - DNA, 25 bp, Unknown
  Description of Unknown: target sequence
tgccccatcactctctcttaattgg

SEQ ID NO: 588 - DNA, 25 bp, Unknown
  Description of Unknown: target sequence
gccccatcactctctcttaattgga

SEQ ID NO: 589 - DNA, 25 bp, Unknown
  Description of Unknown: target sequence
ccccatcactctctcttaattggat

SEQ ID NO: 590 - DNA, 25 bp, Unknown
  Description of Unknown: target sequence
cccatcactctctcttaattggatt

SEQ ID NO: 591 - DNA, 25 bp, Unknown
  Description of Unknown: target sequence
ccatcactctctcttaattggattt

SEQ ID NO: 592 - DNA, 25 bp, Unknown
  Description of Unknown: target sequence
catcactctctcttaattggatttt

SEQ ID NO: 593 - DNA, 25 bp, Unknown
  Description of Unknown: target sequence
atcactctctcttaattggattttt

SEQ ID NO: 594 - DNA, 25 bp, Unknown
  Description of Unknown: target sequence
tcactctctcttaattggattttta

SEQ ID NO: 595 - DNA, 25 bp, Unknown
  Description of Unknown: target sequence
cactctctcttaattggatttttaa

SEQ ID NO: 596 - DNA, 25 bp, Unknown
  Description of Unknown: target sequence
actctctcttaattggatttttaaa

SEQ ID NO: 597 - DNA, 25 bp, Unknown
  Description of Unknown: target sequence
ctctctcttaattggatttttaaaa

SEQ ID NO: 598 - DNA, 25 bp, Unknown
  Description of Unknown: target sequence
tctctcttaattggatttttaaaat

SEQ ID NO: 599 - DNA, 25 bp, Unknown
  Description of Unknown: target sequence
ctctcttaattggatttttaaaatt

SEQ ID NO: 600 - DNA, 25 bp, Unknown
  Description of Unknown: target sequence
tctcttaattggatttttaaaatta

SEQ ID NO: 601 - DNA, 25 bp, Unknown
  Description of Unknown: target sequence
ctcttaattggatttttaaaattat

SEQ ID NO: 602 - DNA, 25 bp, Unknown
  Description of Unknown: target sequence
tcttaattggatttttaaaattata

SEQ ID NO: 603 - DNA, 25 bp, Unknown
  Description of Unknown: target sequence
cttaattggatttttaaaattatat

SEQ ID NO: 604 - DNA, 25 bp, Unknown
  Description of Unknown: target sequence
ttaattggatttttaaaattatatt

SEQ ID NO: 605 - DNA, 25 bp, Unknown
  Description of Unknown: target sequence
taattggatttttaaaattatattc

SEQ ID NO: 606 - DNA, 25 bp, Unknown
  Description of Unknown: target sequence
aattggatttttaaaattatattca

SEQ ID NO: 607 - DNA, 25 bp, Unknown
  Description of Unknown: target sequence
attggatttttaaaattatattcat

SEQ ID NO: 608 - DNA, 25 bp, Unknown
  Description of Unknown: target sequence
ttggatttttaaaattatattcata

SEQ ID NO: 609 - DNA, 25 bp, Unknown
  Description of Unknown: target sequence
tggatttttaaaattatattcatat

SEQ ID NO: 610 - DNA, 25 bp, Unknown
  Description of Unknown: target sequence
ggatttttaaaattatattcatatt

SEQ ID NO: 611 - DNA, 25 bp, Unknown
  Description of Unknown: target sequence
gatttttaaaattatattcatattg

SEQ ID NO: 612 - DNA, 25 bp, Unknown
  Description of Unknown: target sequence
atttttaaaattatattcatattgc

SEQ ID NO: 613 - DNA, 25 bp, Unknown
  Description of Unknown: target sequence
tttttaaaattatattcatattgca

SEQ ID NO: 614 - DNA, 25 bp, Unknown
  Description of Unknown: target sequence
ttttaaaattatattcatattgcag

SEQ ID NO: 615 - DNA, 25 bp, Unknown
  Description of Unknown: target sequence
tttaaaattatattcatattgcagg

SEQ ID NO: 616 - DNA, 25 bp, Unknown
  Description of Unknown: target sequence
ttaaaattatattcatattgcagga

SEQ ID NO: 617 - DNA, 25 bp, Unknown
  Description of Unknown: target sequence
taaaattatattcatattgcaggac

SEQ ID NO: 618 - DNA, 25 bp, Unknown
  Description of Unknown: target sequence
aaaattatattcatattgcaggact

SEQ ID NO: 619 - DNA, 25 bp, Unknown
  Description of Unknown: target sequence
aaattatattcatattgcaggactc

SEQ ID NO: 620 - DNA, 25 bp, Unknown
  Description of Unknown: target sequence
aattatattcatattgcaggactcg

SEQ ID NO: 621 - DNA, 25 bp, Unknown
  Description of Unknown: target sequence
attatattcatattgcaggactcgg

SEQ ID NO: 622 - DNA, 25 bp, Unknown
  Description of Unknown: target sequence
ttatattcatattgcaggactcggc

SEQ ID NO: 623 - DNA, 25 bp, Unknown
  Description of Unknown: target sequence
tatattcatattgcaggactcggca

SEQ ID NO: 624 - DNA, 25 bp, Unknown
  Description of Unknown: target sequence
atattcatattgcaggactcggcag

SEQ ID NO: 625 - DNA, 25 bp, Unknown
  Description of Unknown: target sequence
tattcatattgcaggactcggcaga

SEQ ID NO: 626 - DNA, 25 bp, Unknown
  Description of Unknown: target sequence
attcatattgcaggactcggcagaa

SEQ ID NO: 627 - DNA, 25 bp, Unknown
  Description of Unknown: target sequence
ttcatattgcaggactcggcagaag

SEQ ID NO: 628 - DNA, 25 bp, Unknown
  Description of Unknown: target sequence
tcatattgcaggactcggcagaaga

SEQ ID NO: 629 - DNA, 25 bp, Unknown
  Description of Unknown: target sequence
catattgcaggactcggcagaagac

SEQ ID NO: 630 - DNA, 25 bp, Unknown
  Description of Unknown: target sequence
atattgcaggactcggcagaagacc

SEQ ID NO: 631 - DNA, 25 bp, Unknown
  Description of Unknown: target sequence
tattgcaggactcggcagaagacct

SEQ ID NO: 632 - DNA, 25 bp, Unknown
  Description of Unknown: target sequence
attgcaggactcggcagaagacctt

SEQ ID NO: 633 - DNA, 25 bp, Unknown
  Description of Unknown: target sequence
ttgcaggactcggcagaagaccttc

SEQ ID NO: 634 - DNA, 25 bp, Unknown
  Description of Unknown: target sequence
tgcaggactcggcagaagaccttcg

SEQ ID NO: 635 - DNA, 25 bp, Unknown
  Description of Unknown: target sequence
gcaggactcggcagaagaccttcga

SEQ ID NO: 636 - DNA, 25 bp, Unknown
  Description of Unknown: target sequence
caggactcggcagaagaccttcgag

SEQ ID NO: 637 - DNA, 25 bp, Unknown
  Description of Unknown: target sequence
aggactcggcagaagaccttcgaga

SEQ ID NO: 638 - DNA, 25 bp, Unknown
  Description of Unknown: target sequence
ggactcggcagaagaccttcgagag

SEQ ID NO: 639 - DNA, 25 bp, Unknown
  Description of Unknown: target sequence
gactcggcagaagaccttcgagaga

SEQ ID NO: 640 - DNA, 25 bp, Unknown
  Description of Unknown: target sequence
actcggcagaagaccttcgagagaa

SEQ ID NO: 641 - DNA, 25 bp, Unknown
  Description of Unknown: target sequence
ctcggcagaagaccttcgagagaaa

SEQ ID NO: 642 - DNA, 25 bp, Unknown
  Description of Unknown: target sequence
tcggcagaagaccttcgagagaaag

SEQ ID NO: 643 - DNA, 25 bp, Unknown
  Description of Unknown: target sequence
cggcagaagaccttcgagagaaagg

SEQ ID NO: 644 - DNA, 25 bp, Unknown
  Description of Unknown: target sequence
ggcagaagaccttcgagagaaaggt

SEQ ID NO: 645 - DNA, 25 bp, Unknown
  Description of Unknown: target sequence
gcagaagaccttcgagagaaaggta

SEQ ID NO: 646 - DNA, 25 bp, Unknown
  Description of Unknown: target sequence
cagaagaccttcgagagaaaggtag

SEQ ID NO: 647 - DNA, 25 bp, Unknown
  Description of Unknown: target sequence
agaagaccttcgagagaaaggtaga

SEQ ID NO: 648 - DNA, 25 bp, Unknown
  Description of Unknown: target sequence
gaagaccttcgagagaaaggtagaa

SEQ ID NO: 649 - DNA, 25 bp, Unknown
  Description of Unknown: target sequence
aagaccttcgagagaaaggtagaaa

SEQ ID NO: 650 - DNA, 25 bp, Unknown
  Description of Unknown: target sequence
agaccttcgagagaaaggtagaaaa

SEQ ID NO: 651 - DNA, 25 bp, Unknown
  Description of Unknown: target sequence
gaccttcgagagaaaggtagaaaat

SEQ ID NO: 652 - DNA, 25 bp, Unknown
  Description of Unknown: target sequence
accttcgagagaaaggtagaaaata

SEQ ID NO: 653 - DNA, 25 bp, Unknown
  Description of Unknown: target sequence
ccttcgagagaaaggtagaaaataa

SEQ ID NO: 654 - DNA, 25 bp, Unknown
  Description of Unknown: target sequence
cttcgagagaaaggtagaaaataag

SEQ ID NO: 655 - DNA, 25 bp, Unknown
  Description of Unknown: target sequence
ttcgagagaaaggtagaaaataaga

SEQ ID NO: 656 - DNA, 25 bp, Unknown
  Description of Unknown: target sequence
tcgagagaaaggtagaaaataagaa

SEQ ID NO: 657 - DNA, 25 bp, Unknown
  Description of Unknown: target sequence
cgagagaaaggtagaaaataagaat

SEQ ID NO: 658 - DNA, 25 bp, Unknown
  Description of Unknown: target sequence
gagagaaaggtagaaaataagaatt

SEQ ID NO: 659 - DNA, 25 bp, Unknown
  Description of Unknown: target sequence
agagaaaggtagaaaataagaattt

SEQ ID NO: 660 - DNA, 25 bp, Unknown
  Description of Unknown: target sequence
gagaaaggtagaaaataagaatttg

SEQ ID NO: 661 - DNA, 25 bp, Unknown
  Description of Unknown: target sequence
agaaaggtagaaaataagaatttgg

SEQ ID NO: 662 - DNA, 25 bp, Unknown
  Description of Unknown: target sequence
gaaaggtagaaaataagaatttggc

SEQ ID NO: 663 - DNA, 25 bp, Unknown
  Description of Unknown: target sequence
aaaggtagaaaataagaatttggct

SEQ ID NO: 664 - DNA, 25 bp, Unknown
  Description of Unknown: target sequence
aaggtagaaaataagaatttggctc

SEQ ID NO: 665 - DNA, 25 bp, Unknown
  Description of Unknown: target sequence
aggtagaaaataagaatttggctct

SEQ ID NO: 666 - DNA, 25 bp, Unknown
  Description of Unknown: target sequence
ggtagaaaataagaatttggctctc

SEQ ID NO: 667 - DNA, 25 bp, Unknown
  Description of Unknown: target sequence
gtagaaaataagaatttggctctct

SEQ ID NO: 668 - DNA, 25 bp, Unknown
  Description of Unknown: target sequence
tagaaaataagaatttggctctctg

SEQ ID NO: 669 - DNA, 25 bp, Unknown
  Description of Unknown: target sequence
agaaaataagaatttggctctctgt

SEQ ID NO: 670 - DNA, 25 bp, Unknown
  Description of Unknown: target sequence
gaaaataagaatttggctctctgtg

SEQ ID NO: 671 - DNA, 25 bp, Unknown
  Description of Unknown: target sequence
aaaataagaatttggctctctgtgt

SEQ ID NO: 672 - DNA, 25 bp, Unknown
  Description of Unknown: target sequence
aaataagaatttggctctctgtgtg

SEQ ID NO: 673 - DNA, 25 bp, Unknown
  Description of Unknown: target sequence
aataagaatttggctctctgtgtga

SEQ ID NO: 674 - DNA, 25 bp, Unknown
  Description of Unknown: target sequence
ataagaatttggctctctgtgtgag

SEQ ID NO: 675 - DNA, 25 bp, Unknown
  Description of Unknown: target sequence
taagaatttggctctctgtgtgagc

SEQ ID NO: 676 - DNA, 25 bp, Unknown
  Description of Unknown: target sequence
aagaatttggctctctgtgtgagca

SEQ ID NO: 677 - DNA, 25 bp, Unknown
  Description of Unknown: target sequence
agaatttggctctctgtgtgagcat

SEQ ID NO: 678 - DNA, 25 bp, Unknown
  Description of Unknown: target sequence
gaatttggctctctgtgtgagcatg

SEQ ID NO: 679 - DNA, 25 bp, Unknown
  Description of Unknown: target sequence
aatttggctctctgtgtgagcatgt

SEQ ID NO: 680 - DNA, 25 bp, Unknown
  Description of Unknown: target sequence
atttggctctctgtgtgagcatgtg

SEQ ID NO: 681 - DNA, 25 bp, Unknown
  Description of Unknown: target sequence
tttggctctctgtgtgagcatgtgt

SEQ ID NO: 682 - DNA, 25 bp, Unknown
  Description of Unknown: target sequence
ttggctctctgtgtgagcatgtgtg

SEQ ID NO: 683 - DNA, 25 bp, Unknown
  Description of Unknown: target sequence
tggctctctgtgtgagcatgtgtgc

SEQ ID NO: 684 - DNA, 25 bp, Unknown
  Description of Unknown: target sequence
ggctctctgtgtgagcatgtgtgcg

SEQ ID NO: 685 - DNA, 25 bp, Unknown
  Description of Unknown: target sequence
gctctctgtgtgagcatgtgtgcgt

SEQ ID NO: 686 - DNA, 25 bp, Unknown
  Description of Unknown: target sequence
ctctctgtgtgagcatgtgtgcgtg

SEQ ID NO: 687 - DNA, 25 bp, Unknown
  Description of Unknown: target sequence
tctctgtgtgagcatgtgtgcgtgt

SEQ ID NO: 688 - DNA, 25 bp, Unknown
  Description of Unknown: target sequence
ctctgtgtgagcatgtgtgcgtgtg

SEQ ID NO: 689 - DNA, 25 bp, Unknown
  Description of Unknown: target sequence
tctgtgtgagcatgtgtgcgtgtgt

SEQ ID NO: 690 - DNA, 25 bp, Unknown
  Description of Unknown: target sequence
ctgtgtgagcatgtgtgcgtgtgtg

SEQ ID NO: 691 - DNA, 25 bp, Unknown
  Description of Unknown: target sequence
tgtgtgagcatgtgtgcgtgtgtgc

SEQ ID NO: 692 - DNA, 25 bp, Unknown
  Description of Unknown: target sequence
gtgtgagcatgtgtgcgtgtgtgcg

SEQ ID NO: 693 - DNA, 25 bp, Unknown
  Description of Unknown: target sequence
tgtgagcatgtgtgcgtgtgtgcga

SEQ ID NO: 694 - DNA, 25 bp, Unknown
  Description of Unknown: target sequence
gtgagcatgtgtgcgtgtgtgcgag

SEQ ID NO: 695 - DNA, 25 bp, Unknown
  Description of Unknown: target sequence
tgagcatgtgtgcgtgtgtgcgaga

SEQ ID NO: 696 - DNA, 25 bp, Unknown
  Description of Unknown: target sequence
gagcatgtgtgcgtgtgtgcgagag

SEQ ID NO: 697 - DNA, 25 bp, Unknown
  Description of Unknown: target sequence
agcatgtgtgcgtgtgtgcgagaga

SEQ ID NO: 698 - DNA, 25 bp, Unknown
  Description of Unknown: target sequence
gcatgtgtgcgtgtgtgcgagagag

SEQ ID NO: 699 - DNA, 25 bp, Unknown
  Description of Unknown: target sequence
catgtgtgcgtgtgtgcgagagaga

SEQ ID NO: 700 - DNA, 25 bp, Unknown
  Description of Unknown: target sequence
atgtgtgcgtgtgtgcgagagagag

SEQ ID NO: 701 - DNA, 25 bp, Unknown
  Description of Unknown: target sequence
tgtgtgcgtgtgtgcgagagagaga

SEQ ID NO: 702 - DNA, 25 bp, Unknown
  Description of Unknown: target sequence
gtgtgcgtgtgtgcgagagagagag

SEQ ID NO: 703 - DNA, 25 bp, Unknown
  Description of Unknown: target sequence
tgtgcgtgtgtgcgagagagagaga

SEQ ID NO: 704 - DNA, 25 bp, Unknown
  Description of Unknown: target sequence
gtgcgtgtgtgcgagagagagagac

SEQ ID NO: 705 - DNA, 25 bp, Unknown
  Description of Unknown: target sequence
tgcgtgtgtgcgagagagagagaca

SEQ ID NO: 706 - DNA, 25 bp, Unknown
  Description of Unknown: target sequence
gcgtgtgtgcgagagagagagacag

SEQ ID NO: 707 - DNA, 25 bp, Unknown
  Description of Unknown: target sequence
cgtgtgtgcgagagagagagacaga

SEQ ID NO: 708 - DNA, 25 bp, Unknown
  Description of Unknown: target sequence
gtgtgtgcgagagagagagacagac

SEQ ID NO: 709 - DNA, 25 bp, Unknown
  Description of Unknown: target sequence
tgtgtgcgagagagagagacagaca

SEQ ID NO: 710 - DNA, 25 bp, Unknown
  Description of Unknown: target sequence
gtgtgcgagagagagagacagacag

SEQ ID NO: 711 - DNA, 25 bp, Unknown
  Description of Unknown: target sequence
tgtgcgagagagagagacagacagc

SEQ ID NO: 712 - DNA, 25 bp, Unknown
  Description of Unknown: target sequence
gtgcgagagagagagacagacagcc

SEQ ID NO: 713 - DNA, 25 bp, Unknown
  Description of Unknown: target sequence
tgcgagagagagagacagacagcct

SEQ ID NO: 714 - DNA, 25 bp, Unknown
  Description of Unknown: target sequence
gcgagagagagagacagacagcctg

SEQ ID NO: 715 - DNA, 25 bp, Unknown
  Description of Unknown: target sequence
cgagagagagagacagacagcctgc

SEQ ID NO: 716 - DNA, 25 bp, Unknown
  Description of Unknown: target sequence
gagagagagagacagacagcctgcc

SEQ ID NO: 717 - DNA, 25 bp, Unknown
  Description of Unknown: target sequence
agagagagagacagacagcctgcct

SEQ ID NO: 718 - DNA, 25 bp, Unknown
  Description of Unknown: target sequence
gagagagagacagacagcctgccta

SEQ ID NO: 719 - DNA, 25 bp, Unknown
  Description of Unknown: target sequence
agagagagacagacagcctgcctaa

SEQ ID NO: 720 - DNA, 25 bp, Unknown
  Description of Unknown: target sequence
gagagagacagacagcctgcctaag

SEQ ID NO: 721 - DNA, 25 bp, Unknown
  Description of Unknown: target sequence
agagagacagacagcctgcctaaga

SEQ ID NO: 722 - DNA, 25 bp, Unknown
  Description of Unknown: target sequence
gagagacagacagcctgcctaagaa

SEQ ID NO: 723 - DNA, 25 bp, Unknown
  Description of Unknown: target sequence
agagacagacagcctgcctaagaag

SEQ ID NO: 724 - DNA, 25 bp, Unknown
  Description of Unknown: target sequence
gagacagacagcctgcctaagaaga

SEQ ID NO: 725 - DNA, 25 bp, Unknown
  Description of Unknown: target sequence
agacagacagcctgcctaagaagaa

SEQ ID NO: 726 - DNA, 25 bp, Unknown
  Description of Unknown: target sequence
gacagacagcctgcctaagaagaaa

SEQ ID NO: 727 - DNA, 25 bp, Unknown
  Description of Unknown: target sequence
acagacagcctgcctaagaagaaat

SEQ ID NO: 728 - DNA, 25 bp, Unknown
  Description of Unknown: target sequence
cagacagcctgcctaagaagaaatg

SEQ ID NO: 729 - DNA, 25 bp, Unknown
  Description of Unknown: target sequence
agacagcctgcctaagaagaaatga

SEQ ID NO: 730 - DNA, 25 bp, Unknown
  Description of Unknown: target sequence
gacagcctgcctaagaagaaatgaa

SEQ ID NO: 731 - DNA, 25 bp, Unknown
  Description of Unknown: target sequence
acagcctgcctaagaagaaatgaat

SEQ ID NO: 732 - DNA, 25 bp, Unknown
  Description of Unknown: target sequence
cagcctgcctaagaagaaatgaatg

SEQ ID NO: 733 - DNA, 25 bp, Unknown
  Description of Unknown: target sequence
agcctgcctaagaagaaatgaatgt

SEQ ID NO: 734 - DNA, 25 bp, Unknown
  Description of Unknown: target sequence
gcctgcctaagaagaaatgaatgtg

SEQ ID NO: 735 - DNA, 25 bp, Unknown
  Description of Unknown: target sequence
cctgcctaagaagaaatgaatgtga

SEQ ID NO: 736 - DNA, 25 bp, Unknown
  Description of Unknown: target sequence
ctgcctaagaagaaatgaatgtgaa

SEQ ID NO: 737 - DNA, 25 bp, Unknown
  Description of Unknown: target sequence
tgcctaagaagaaatgaatgtgaat

SEQ ID NO: 738 - DNA, 25 bp, Unknown
  Description of Unknown: target sequence
gcctaagaagaaatgaatgtgaatg

SEQ ID NO: 739 - DNA, 25 bp, Unknown
  Description of Unknown: target sequence
cctaagaagaaatgaatgtgaatgc

SEQ ID NO: 740 - DNA, 25 bp, Unknown
  Description of Unknown: target sequence
ctaagaagaaatgaatgtgaatgcg

SEQ ID NO: 741 - DNA, 25 bp, Unknown
  Description of Unknown: target sequence
taagaagaaatgaatgtgaatgcgg

SEQ ID NO: 742 - DNA, 25 bp, Unknown
  Description of Unknown: target sequence
aagaagaaatgaatgtgaatgcggc

SEQ ID NO: 743 - DNA, 25 bp, Unknown
  Description of Unknown: target sequence
agaagaaatgaatgtgaatgcggct

SEQ ID NO: 744 - DNA, 25 bp, Unknown
  Description of Unknown: target sequence
gaagaaatgaatgtgaatgcggctt

SEQ ID NO: 745 - DNA, 25 bp, Unknown
  Description of Unknown: target sequence
aagaaatgaatgtgaatgcggcttg

SEQ ID NO: 746 - DNA, 25 bp, Unknown
  Description of Unknown: target sequence
agaaatgaatgtgaatgcggcttgt

SEQ ID NO: 747 - DNA, 25 bp, Unknown
  Description of Unknown: target sequence
gaaatgaatgtgaatgcggcttgtg

SEQ ID NO: 748 - DNA, 25 bp, Unknown
  Description of Unknown: target sequence
aaatgaatgtgaatgcggcttgtgg

SEQ ID NO: 749 - DNA, 25 bp, Unknown
  Description of Unknown: target sequence
aatgaatgtgaatgcggcttgtggc

SEQ ID NO: 750 - DNA, 25 bp, Unknown
  Description of Unknown: target sequence
atgaatgtgaatgcggcttgtggca

SEQ ID NO: 751 - DNA, 25 bp, Unknown
  Description of Unknown: target sequence
tgaatgtgaatgcggcttgtggcac

SEQ ID NO: 752 - DNA, 25 bp, Unknown
  Description of Unknown: target sequence
gaatgtgaatgcggcttgtggcaca

SEQ ID NO: 753 - DNA, 25 bp, Unknown
  Description of Unknown: target sequence
aatgtgaatgcggcttgtggcacag

SEQ ID NO: 754 - DNA, 25 bp, Unknown
  Description of Unknown: target sequence
atgtgaatgcggcttgtggcacagt

SEQ ID NO: 755 - DNA, 25 bp, Unknown
  Description of Unknown: target sequence
tgtgaatgcggcttgtggcacagtt

SEQ ID NO: 756 - DNA, 25 bp, Unknown
  Description of Unknown: target sequence
gtgaatgcggcttgtggcacagttg

SEQ ID NO: 757 - DNA, 25 bp, Unknown
  Description of Unknown: target sequence
tgaatgcggcttgtggcacagttga

SEQ ID NO: 758 - DNA, 25 bp, Unknown
  Description of Unknown: target sequence
gaatgcggcttgtggcacagttgac

SEQ ID NO: 759 - DNA, 25 bp, Unknown
  Description of Unknown: target sequence
aatgcggcttgtggcacagttgaca

SEQ ID NO: 760 - DNA, 25 bp, Unknown
  Description of Unknown: target sequence
atgcggcttgtggcacagttgacaa

SEQ ID NO: 761 - DNA, 25 bp, Unknown
  Description of Unknown: target sequence
tgcggcttgtggcacagttgacaag

SEQ ID NO: 762 - DNA, 25 bp, Unknown
  Description of Unknown: target sequence
gcggcttgtggcacagttgacaagg

SEQ ID NO: 763 - DNA, 25 bp, Unknown
  Description of Unknown: target sequence
cggcttgtggcacagttgacaagga

SEQ ID NO: 764 - DNA, 25 bp, Unknown
  Description of Unknown: target sequence
ggcttgtggcacagttgacaaggat

SEQ ID NO: 765 - DNA, 25 bp, Unknown
  Description of Unknown: target sequence
gcttgtggcacagttgacaaggatg

SEQ ID NO: 766 - DNA, 25 bp, Unknown
  Description of Unknown: target sequence
cttgtggcacagttgacaaggatga

SEQ ID NO: 767 - DNA, 25 bp, Unknown
  Description of Unknown: target sequence
ttgtggcacagttgacaaggatgat

SEQ ID NO: 768 - DNA, 25 bp, Unknown
  Description of Unknown: target sequence
tgtggcacagttgacaaggatgata

SEQ ID NO: 769 - DNA, 25 bp, Unknown
  Description of Unknown: target sequence
gtggcacagttgacaaggatgataa

SEQ ID NO: 770 - DNA, 25 bp, Unknown
  Description of Unknown: target sequence
tggcacagttgacaaggatgataaa

SEQ ID NO: 771 - DNA, 25 bp, Unknown
  Description of Unknown: target sequence
ggcacagttgacaaggatgataaat

SEQ ID NO: 772 - DNA, 25 bp, Unknown
  Description of Unknown: target sequence
gcacagttgacaaggatgataaatc

SEQ ID NO: 773 - DNA, 25 bp, Unknown
  Description of Unknown: target sequence
cacagttgacaaggatgataaatca

SEQ ID NO: 774 - DNA, 25 bp, Unknown
  Description of Unknown: target sequence
acagttgacaaggatgataaatcaa

SEQ ID NO: 775 - DNA, 25 bp, Unknown
  Description of Unknown: target sequence
cagttgacaaggatgataaatcaat

SEQ ID NO: 776 - DNA, 25 bp, Unknown
  Description of Unknown: target sequence
agttgacaaggatgataaatcaata

SEQ ID NO: 777 - DNA, 25 bp, Unknown
  Description of Unknown: target sequence
gttgacaaggatgataaatcaataa

SEQ ID NO: 778 - DNA, 25 bp, Unknown
  Description of Unknown: target sequence
ttgacaaggatgataaatcaataat

SEQ ID NO: 779 - DNA, 25 bp, Unknown
  Description of Unknown: target sequence
tgacaaggatgataaatcaataatg

SEQ ID NO: 780 - DNA, 25 bp, Unknown
  Description of Unknown: target sequence
gacaaggatgataaatcaataatgc

SEQ ID NO: 781 - DNA, 25 bp, Unknown
  Description of Unknown: target sequence
acaaggatgataaatcaataatgca

SEQ ID NO: 782 - DNA, 25 bp, Unknown
  Description of Unknown: target sequence
caaggatgataaatcaataatgcaa

SEQ ID NO: 783 - DNA, 25 bp, Unknown
  Description of Unknown: target sequence
aaggatgataaatcaataatgcaag

SEQ ID NO: 784 - DNA, 25 bp, Unknown
  Description of Unknown: target sequence
aggatgataaatcaataatgcaagc

SEQ ID NO: 785 - DNA, 25 bp, Unknown
  Description of Unknown: target sequence
ggatgataaatcaataatgcaagct

SEQ ID NO: 786 - DNA, 25 bp, Unknown
  Description of Unknown: target sequence
gatgataaatcaataatgcaagctt

SEQ ID NO: 787 - DNA, 25 bp, Unknown
  Description of Unknown: target sequence
atgataaatcaataatgcaagctta

SEQ ID NO: 788 - DNA, 25 bp, Unknown
  Description of Unknown: target sequence
tgataaatcaataatgcaagcttac

SEQ ID NO: 789 - DNA, 25 bp, Unknown
  Description of Unknown: target sequence
gataaatcaataatgcaagcttact

SEQ ID NO: 790 - DNA, 25 bp, Unknown
  Description of Unknown: target sequence
ataaatcaataatgcaagcttacta

SEQ ID NO: 791 - DNA, 25 bp, Unknown
  Description of Unknown: target sequence
taaatcaataatgcaagcttactat

SEQ ID NO: 792 - DNA, 25 bp, Unknown
  Description of Unknown: target sequence
aaatcaataatgcaagcttactatc

SEQ ID NO: 793 - DNA, 25 bp, Unknown
  Description of Unknown: target sequence
aatcaataatgcaagcttactatca

SEQ ID NO: 794 - DNA, 25 bp, Unknown
  Description of Unknown: target sequence
atcaataatgcaagcttactatcat

SEQ ID NO: 795 - DNA, 25 bp, Unknown
  Description of Unknown: target sequence
tcaataatgcaagcttactatcatt

SEQ ID NO: 796 - DNA, 25 bp, Unknown
  Description of Unknown: target sequence
caataatgcaagcttactatcattt

SEQ ID NO: 797 - DNA, 25 bp, Unknown
  Description of Unknown: target sequence
aataatgcaagcttactatcattta

SEQ ID NO: 798 - DNA, 25 bp, Unknown
  Description of Unknown: target sequence
ataatgcaagcttactatcatttat

SEQ ID NO: 799 - DNA, 25 bp, Unknown
  Description of Unknown: target sequence
taatgcaagcttactatcatttatg

SEQ ID NO: 800 - DNA, 25 bp, Unknown
  Description of Unknown: target sequence
aatgcaagcttactatcatttatga

SEQ ID NO: 801 - DNA, 25 bp, Unknown
  Description of Unknown: target sequence
atgcaagcttactatcatttatgaa

SEQ ID NO: 802 - DNA, 25 bp, Unknown
  Description of Unknown: target sequence
tgcaagcttactatcatttatgaat

SEQ ID NO: 803 - DNA, 25 bp, Unknown
  Description of Unknown: target sequence
gcaagcttactatcatttatgaata

SEQ ID NO: 804 - DNA, 25 bp, Unknown
  Description of Unknown: target sequence
caagcttactatcatttatgaatag

SEQ ID NO: 805 - DNA, 25 bp, Unknown
  Description of Unknown: target sequence
aagcttactatcatttatgaatagc

SEQ ID NO: 806 - DNA, 25 bp, Unknown
  Description of Unknown: target sequence
agcttactatcatttatgaatagca

SEQ ID NO: 807 - DNA, 25 bp, Unknown
  Description of Unknown: target sequence
gcttactatcatttatgaatagcaa

SEQ ID NO: 808 - DNA, 25 bp, Unknown
  Description of Unknown: target sequence
cttactatcatttatgaatagcaat

SEQ ID NO: 809 - DNA, 25 bp, Unknown
  Description of Unknown: target sequence
ttactatcatttatgaatagcaata

SEQ ID NO: 810 - DNA, 25 bp, Unknown
  Description of Unknown: target sequence
tactatcatttatgaatagcaatac

SEQ ID NO: 811 - DNA, 25 bp, Unknown
  Description of Unknown: target sequence
actatcatttatgaatagcaatact

SEQ ID NO: 812 - DNA, 25 bp, Unknown
  Description of Unknown: target sequence
ctatcatttatgaatagcaatactg

SEQ ID NO: 813 - DNA, 25 bp, Unknown
  Description of Unknown: target sequence
tatcatttatgaatagcaatactga

SEQ ID NO: 814 - DNA, 25 bp, Unknown
  Description of Unknown: target sequence
atcatttatgaatagcaatactgaa

SEQ ID NO: 815 - DNA, 25 bp, Unknown
  Description of Unknown: target sequence
tcatttatgaatagcaatactgaag

SEQ ID NO: 816 - DNA, 25 bp, Unknown
  Description of Unknown: target sequence
catttatgaatagcaatactgaaga

SEQ ID NO: 817 - DNA, 25 bp, Unknown
  Description of Unknown: target sequence
atttatgaatagcaatactgaagaa

SEQ ID NO: 818 - DNA, 25 bp, Unknown
  Description of Unknown: target sequence
tttatgaatagcaatactgaagaaa

SEQ ID NO: 819 - DNA, 25 bp, Unknown
  Description of Unknown: target sequence
ttatgaatagcaatactgaagaaat

SEQ ID NO: 820 - DNA, 25 bp, Unknown
  Description of Unknown: target sequence
tatgaatagcaatactgaagaaatt

SEQ ID NO: 821 - DNA, 25 bp, Unknown
  Description of Unknown: target sequence
atgaatagcaatactgaagaaatta

SEQ ID NO: 822 - DNA, 25 bp, Unknown
  Description of Unknown: target sequence
tgaatagcaatactgaagaaattaa

SEQ ID NO: 823 - DNA, 25 bp, Unknown
  Description of Unknown: target sequence
gaatagcaatactgaagaaattaaa

SEQ ID NO: 824 - DNA, 25 bp, Unknown
  Description of Unknown: target sequence
aatagcaatactgaagaaattaaaa

SEQ ID NO: 825 - DNA, 25 bp, Unknown
  Description of Unknown: target sequence
atagcaatactgaagaaattaaaac

SEQ ID NO: 826 - DNA, 25 bp, Unknown
  Description of Unknown: target sequence
tagcaatactgaagaaattaaaaca

SEQ ID NO: 827 - DNA, 25 bp, Unknown
  Description of Unknown: target sequence
agcaatactgaagaaattaaaacaa

SEQ ID NO: 828 - DNA, 25 bp, Unknown
  Description of Unknown: target sequence
gcaatactgaagaaattaaaacaaa

SEQ ID NO: 829 - DNA, 25 bp, Unknown
  Description of Unknown: target sequence
caatactgaagaaattaaaacaaaa

SEQ ID NO: 830 - DNA, 25 bp, Unknown
  Description of Unknown: target sequence
aatactgaagaaattaaaacaaaag

SEQ ID NO: 831 - DNA, 25 bp, Unknown
  Description of Unknown: target sequence
atactgaagaaattaaaacaaaaga

SEQ ID NO: 832 - DNA, 25 bp, Unknown
  Description of Unknown: target sequence
tactgaagaaattaaaacaaaagat

SEQ ID NO: 833 - DNA, 25 bp, Unknown
  Description of Unknown: target sequence
actgaagaaattaaaacaaaagatt

SEQ ID NO: 834 - DNA, 25 bp, Unknown
  Description of Unknown: target sequence
ctgaagaaattaaaacaaaagattg

SEQ ID NO: 835 - DNA, 25 bp, Unknown
  Description of Unknown: target sequence
tgaagaaattaaaacaaaagattgc

SEQ ID NO: 836 - DNA, 25 bp, Unknown
  Description of Unknown: target sequence
gaagaaattaaaacaaaagattgct

SEQ ID NO: 837 - DNA, 25 bp, Unknown
  Description of Unknown: target sequence
aagaaattaaaacaaaagattgctg

SEQ ID NO: 838 - DNA, 25 bp, Unknown
  Description of Unknown: target sequence
agaaattaaaacaaaagattgctgt

SEQ ID NO: 839 - DNA, 25 bp, Unknown
  Description of Unknown: target sequence
gaaattaaaacaaaagattgctgtc

SEQ ID NO: 840 - DNA, 25 bp, Unknown
  Description of Unknown: target sequence
aaattaaaacaaaagattgctgtct

SEQ ID NO: 841 - DNA, 25 bp, Unknown
  Description of Unknown: target sequence
aattaaaacaaaagattgctgtctc

SEQ ID NO: 842 - DNA, 25 bp, Unknown
  Description of Unknown: target sequence
attaaaacaaaagattgctgtctca

SEQ ID NO: 843 - DNA, 25 bp, Unknown
  Description of Unknown: target sequence
ttaaaacaaaagattgctgtctcaa

SEQ ID NO: 844 - DNA, 25 bp, Unknown
  Description of Unknown: target sequence
taaaacaaaagattgctgtctcaat

SEQ ID NO: 845 - DNA, 25 bp, Unknown
  Description of Unknown: target sequence
aaaacaaaagattgctgtctcaata

SEQ ID NO: 846 - DNA, 25 bp, Unknown
  Description of Unknown: target sequence
aaacaaaagattgctgtctcaatat

SEQ ID NO: 847 - DNA, 25 bp, Unknown
  Description of Unknown: target sequence
aacaaaagattgctgtctcaatata

SEQ ID NO: 848 - DNA, 25 bp, Unknown
  Description of Unknown: target sequence
acaaaagattgctgtctcaatatat

SEQ ID NO: 849 - DNA, 25 bp, Unknown
  Description of Unknown: target sequence
caaaagattgctgtctcaatatatc

SEQ ID NO: 850 - DNA, 25 bp, Unknown
  Description of Unknown: target sequence
aaaagattgctgtctcaatatatct

SEQ ID NO: 851 - DNA, 25 bp, Unknown
  Description of Unknown: target sequence
aaagattgctgtctcaatatatctt

SEQ ID NO: 852 - DNA, 25 bp, Unknown
  Description of Unknown: target sequence
aagattgctgtctcaatatatctta

SEQ ID NO: 853 - DNA, 25 bp, Unknown
  Description of Unknown: target sequence
agattgctgtctcaatatatcttat

SEQ ID NO: 854 - DNA, 25 bp, Unknown
  Description of Unknown: target sequence
gattgctgtctcaatatatcttata

SEQ ID NO: 855 - DNA, 25 bp, Unknown
  Description of Unknown: target sequence
attgctgtctcaatatatcttatat

SEQ ID NO: 856 - DNA, 25 bp, Unknown
  Description of Unknown: target sequence
ttgctgtctcaatatatcttatatt

SEQ ID NO: 857 - DNA, 25 bp, Unknown
  Description of Unknown: target sequence
tgctgtctcaatatatcttatattt

SEQ ID NO: 858 - DNA, 25 bp, Unknown
  Description of Unknown: target sequence
gctgtctcaatatatcttatattta

SEQ ID NO: 859 - DNA, 25 bp, Unknown
  Description of Unknown: target sequence
ctgtctcaatatatcttatatttat

SEQ ID NO: 860 - DNA, 25 bp, Unknown
  Description of Unknown: target sequence
tgtctcaatatatcttatatttatt

SEQ ID NO: 861 - DNA, 25 bp, Unknown
  Description of Unknown: target sequence
gtctcaatatatcttatatttatta

SEQ ID NO: 862 - DNA, 25 bp, Unknown
  Description of Unknown: target sequence
tctcaatatatcttatatttattat

SEQ ID NO: 863 - DNA, 25 bp, Unknown
  Description of Unknown: target sequence
ctcaatatatcttatatttattatt

SEQ ID NO: 864 - DNA, 25 bp, Unknown
  Description of Unknown: target sequence
tcaatatatcttatatttattattt

SEQ ID NO: 865 - DNA, 25 bp, Unknown
  Description of Unknown: target sequence
caatatatcttatatttattattta

SEQ ID NO: 866 - DNA, 25 bp, Unknown
  Description of Unknown: target sequence
aatatatcttatatttattatttac

SEQ ID NO: 867 - DNA, 25 bp, Unknown
  Description of Unknown: target sequence
atatatcttatatttattatttacc

SEQ ID NO: 868 - DNA, 25 bp, Unknown
  Description of Unknown: target sequence
tatatcttatatttattatttacca

SEQ ID NO: 869 - DNA, 25 bp, Unknown
  Description of Unknown: target sequence
atatcttatatttattatttaccaa

SEQ ID NO: 870 - DNA, 25 bp, Unknown
  Description of Unknown: target sequence
tatcttatatttattatttaccaaa

SEQ ID NO: 871 - DNA, 25 bp, Unknown
  Description of Unknown: target sequence
atcttatatttattatttaccaaat

SEQ ID NO: 872 - DNA, 25 bp, Unknown
  Description of Unknown: target sequence
tcttatatttattatttaccaaatt

SEQ ID NO: 873 - DNA, 25 bp, Unknown
  Description of Unknown: target sequence
cttatatttattatttaccaaatta

SEQ ID NO: 874 - DNA, 25 bp, Unknown
  Description of Unknown: target sequence
ttatatttattatttaccaaattat

SEQ ID NO: 875 - DNA, 25 bp, Unknown
  Description of Unknown: target sequence
tatatttattatttaccaaattatt

SEQ ID NO: 876 - DNA, 25 bp, Unknown
  Description of Unknown: target sequence
atatttattatttaccaaattattc

SEQ ID NO: 877 - DNA, 25 bp, Unknown
  Description of Unknown: target sequence
tatttattatttaccaaattattct

SEQ ID NO: 878 - DNA, 25 bp, Unknown
  Description of Unknown: target sequence
atttattatttaccaaattattcta

SEQ ID NO: 879 - DNA, 25 bp, Unknown
  Description of Unknown: target sequence
tttattatttaccaaattattctaa

SEQ ID NO: 880 - DNA, 25 bp, Unknown
  Description of Unknown: target sequence
ttattatttaccaaattattctaag

SEQ ID NO: 881 - DNA, 25 bp, Unknown
  Description of Unknown: target sequence
tattatttaccaaattattctaaga

SEQ ID NO: 882 - DNA, 25 bp, Unknown
  Description of Unknown: target sequence
attatttaccaaattattctaagag

SEQ ID NO: 883 - DNA, 25 bp, Unknown
  Description of Unknown: target sequence
ttatttaccaaattattctaagagt

SEQ ID NO: 884 - DNA, 25 bp, Unknown
  Description of Unknown: target sequence
tatttaccaaattattctaagagta

SEQ ID NO: 885 - DNA, 25 bp, Unknown
  Description of Unknown: target sequence
atttaccaaattattctaagagtat

SEQ ID NO: 886 - DNA, 25 bp, Unknown
  Description of Unknown: target sequence
tttaccaaattattctaagagtatt

SEQ ID NO: 887 - DNA, 25 bp, Unknown
  Description of Unknown: target sequence
ttaccaaattattctaagagtattt

SEQ ID NO: 888 - DNA, 25 bp, Unknown
  Description of Unknown: target sequence
taccaaattattctaagagtatttc

SEQ ID NO: 889 - DNA, 25 bp, Unknown
  Description of Unknown: target sequence
accaaattattctaagagtatttct

SEQ ID NO: 890 - DNA, 25 bp, Unknown
  Description of Unknown: target sequence
ccaaattattctaagagtatttctt

SEQ ID NO: 891 - DNA, 25 bp, Unknown
  Description of Unknown: target sequence
caaattattctaagagtatttcttc

SEQ ID NO: 892 - DNA, 25 bp, Unknown
  Description of Unknown: target sequence
aaattattctaagagtatttcttcc

SEQ ID NO: 893 - RNA, 25 nt, Artificial Sequence
  Description of Artificial Sequence: Synthetic oligonucleotide
ggagggauaccuguauauuacaagu

SEQ ID NO: 894 - RNA, 25 nt, Artificial Sequence
  Description of Artificial Sequence: Synthetic oligonucleotide
aggagggauaccuguauauuacaag

SEQ ID NO: 895 - RNA, 25 nt, Artificial Sequence
  Description of Artificial Sequence: Synthetic oligonucleotide
caggagggauaccuguauauuacaa

SEQ ID NO: 896 - RNA, 25 nt, Artificial Sequence
  Description of Artificial Sequence: Synthetic oligonucleotide
ccaggagggauaccuguauauuaca

SEQ ID NO: 897 - RNA, 25 nt, Artificial Sequence
  Description of Artificial Sequence: Synthetic oligonucleotide
accaggagggauaccuguauauuac

SEQ ID NO: 898 - RNA, 25 nt, Artificial Sequence
  Description of Artificial Sequence: Synthetic oligonucleotide
uaccaggagggauaccuguauauua

SEQ ID NO: 899 - RNA, 25 nt, Artificial Sequence
  Description of Artificial Sequence: Synthetic oligonucleotide
uuaccaggagggauaccuguauauu

SEQ ID NO: 900 - RNA, 25 nt, Artificial Sequence
  Description of Artificial Sequence: Synthetic oligonucleotide
cuuaccaggagggauaccuguauau

SEQ ID NO: 901 - RNA, 25 nt, Artificial Sequence
  Description of Artificial Sequence: Synthetic oligonucleotide
gcuuaccaggagggauaccuguaua

SEQ ID NO: 902 - RNA, 25 nt, Artificial Sequence
  Description of Artificial Sequence: Synthetic oligonucleotide
agcuuaccaggagggauaccuguau

SEQ ID NO: 903 - RNA, 25 nt, Artificial Sequence
  Description of Artificial Sequence: Synthetic oligonucleotide
gagcuuaccaggagggauaccugua

SEQ ID NO: 904 - RNA, 25 nt, Artificial Sequence
  Description of Artificial Sequence: Synthetic oligonucleotide
agagcuuaccaggagggauaccugu

SEQ ID NO: 905 - RNA, 25 nt, Artificial Sequence
  Description of Artificial Sequence: Synthetic oligonucleotide
cagagcuuaccaggagggauaccug

SEQ ID NO: 906 - RNA, 25 nt, Artificial Sequence
  Description of Artificial Sequence: Synthetic oligonucleotide
ccagagcuuaccaggagggauaccu

SEQ ID NO: 907 - RNA, 25 nt, Artificial Sequence
  Description of Artificial Sequence: Synthetic oligonucleotide
accagagcuuaccaggagggauacc

SEQ ID NO: 908 - RNA, 25 nt, Artificial Sequence
  Description of Artificial Sequence: Synthetic oligonucleotide
uaccagagcuuaccaggagggauac

SEQ ID NO: 909 - RNA, 25 nt, Artificial Sequence
  Description of Artificial Sequence: Synthetic oligonucleotide
auaccagagcuuaccaggagggaua

SEQ ID NO: 910 - RNA, 25 nt, Artificial Sequence
  Description of Artificial Sequence: Synthetic oligonucleotide
aauaccagagcuuaccaggagggau

SEQ ID NO: 911 - RNA, 25 nt, Artificial Sequence
  Description of Artificial Sequence: Synthetic oligonucleotide
uaauaccagagcuuaccaggaggga

SEQ ID NO: 912 - RNA, 25 nt, Artificial Sequence
  Description of Artificial Sequence: Synthetic oligonucleotide
auaauaccagagcuuaccaggaggg

SEQ ID NO: 913 - RNA, 25 nt, Artificial Sequence
  Description of Artificial Sequence: Synthetic oligonucleotide
cauaauaccagagcuuaccaggagg

SEQ ID NO: 914 - RNA, 25 nt, Artificial Sequence
  Description of Artificial Sequence: Synthetic oligonucleotide
acauaauaccagagcuuaccaggag

SEQ ID NO: 915 - RNA, 25 nt, Artificial Sequence
  Description of Artificial Sequence: Synthetic oligonucleotide
gacauaauaccagagcuuaccagga

SEQ ID NO: 916 - RNA, 25 nt, Artificial Sequence
  Description of Artificial Sequence: Synthetic oligonucleotide
agacauaauaccagagcuuaccagg

SEQ ID NO: 917 - RNA, 25 nt, Artificial Sequence
  Description of Artificial Sequence: Synthetic oligonucleotide
aagacauaauaccagagcuuaccag

SEQ ID NO: 918 - RNA, 25 nt, Artificial Sequence
  Description of Artificial Sequence: Synthetic oligonucleotide
uaagacauaauaccagagcuuacca

SEQ ID NO: 919 - RNA, 25 nt, Artificial Sequence
  Description of Artificial Sequence: Synthetic oligonucleotide
uuaagacauaauaccagagcuuacc

SEQ ID NO: 920 - RNA, 25 nt, Artificial Sequence
  Description of Artificial Sequence: Synthetic oligonucleotide
guuaagacauaauaccagagcuuac

SEQ ID NO: 921 - RNA, 25 nt, Artificial Sequence
  Description of Artificial Sequence: Synthetic oligonucleotide
uguuaagacauaauaccagagcuua

SEQ ID NO: 922 - RNA, 25 nt, Artificial Sequence
  Description of Artificial Sequence: Synthetic oligonucleotide
auguuaagacauaauaccagagcuu

SEQ ID NO: 923 - RNA, 25 nt, Artificial Sequence
  Description of Artificial Sequence: Synthetic oligonucleotide
aauguuaagacauaauaccagagcu

SEQ ID NO: 924 - RNA, 25 nt, Artificial Sequence
  Description of Artificial Sequence: Synthetic oligonucleotide
aaauguuaagacauaauaccagagc

SEQ ID NO: 925 - RNA, 25 nt, Artificial Sequence
  Description of Artificial Sequence: Synthetic oligonucleotide
aaaauguuaagacauaauaccagag

SEQ ID NO: 926 - RNA, 25 nt, Artificial Sequence
  Description of Artificial Sequence: Synthetic oligonucleotide
aaaaauguuaagacauaauaccaga

SEQ ID NO: 927 - RNA, 25 nt, Artificial Sequence
  Description of Artificial Sequence: Synthetic oligonucleotide
uaaaaauguuaagacauaauaccag

SEQ ID NO: 928 - RNA, 25 nt, Artificial Sequence
  Description of Artificial Sequence: Synthetic oligonucleotide
uuaaaaauguuaagacauaauacca

SEQ ID NO: 929 - RNA, 25 nt, Artificial Sequence
  Description of Artificial Sequence: Synthetic oligonucleotide
uuuaaaaauguuaagacauaauacc

SEQ ID NO: 930 - RNA, 25 nt, Artificial Sequence
  Description of Artificial Sequence: Synthetic oligonucleotide
auuuaaaaauguuaagacauaauac

SEQ ID NO: 931 - RNA, 25 nt, Artificial Sequence
  Description of Artificial Sequence: Synthetic oligonucleotide
gauuuaaaaauguuaagacauaaua

SEQ ID NO: 932 - RNA, 25 nt, Artificial Sequence
  Description of Artificial Sequence: Synthetic oligonucleotide
agauuuaaaaauguuaagacauaau

SEQ ID NO: 933 - RNA, 25 nt, Artificial Sequence
  Description of Artificial Sequence: Synthetic oligonucleotide
uagauuuaaaaauguuaagacauaa

SEQ ID NO: 934 - RNA, 25 nt, Artificial Sequence
  Description of Artificial Sequence: Synthetic oligonucleotide
auagauuuaaaaauguuaagacaua

SEQ ID NO: 935 - RNA, 25 nt, Artificial Sequence
  Description of Artificial Sequence: Synthetic oligonucleotide
cauagauuuaaaaauguuaagacau

SEQ ID NO: 936 - RNA, 25 nt, Artificial Sequence
  Description of Artificial Sequence: Synthetic oligonucleotide
ccauagauuuaaaaauguuaagaca

SEQ ID NO: 937 - RNA, 25 nt, Artificial Sequence
  Description of Artificial Sequence: Synthetic oligonucleotide
accauagauuuaaaaauguuaagac

SEQ ID NO: 938 - RNA, 25 nt, Artificial Sequence
  Description of Artificial Sequence: Synthetic oligonucleotide
uaccauagauuuaaaaauguuaaga

SEQ ID NO: 939 - RNA, 25 nt, Artificial Sequence
  Description of Artificial Sequence: Synthetic oligonucleotide
uuaccauagauuuaaaaauguuaag

SEQ ID NO: 940 - RNA, 25 nt, Artificial Sequence
  Description of Artificial Sequence: Synthetic oligonucleotide
auuaccauagauuuaaaaauguuaa

SEQ ID NO: 941 - RNA, 25 nt, Artificial Sequence
  Description of Artificial Sequence: Synthetic oligonucleotide
gauuaccauagauuuaaaaauguua

SEQ ID NO: 942 - RNA, 25 nt, Artificial Sequence
  Description of Artificial Sequence: Synthetic oligonucleotide
agauuaccauagauuuaaaaauguu

SEQ ID NO: 943 - RNA, 25 nt, Artificial Sequence
  Description of Artificial Sequence: Synthetic oligonucleotide
aagauuaccauagauuuaaaaaugu

SEQ ID NO: 944 - RNA, 25 nt, Artificial Sequence
  Description of Artificial Sequence: Synthetic oligonucleotide
aaagauuaccauagauuuaaaaaug

SEQ ID NO: 945 - RNA, 25 nt, Artificial Sequence
  Description of Artificial Sequence: Synthetic oligonucleotide
uaaagauuaccauagauuuaaaaau

SEQ ID NO: 946 - RNA, 25 nt, Artificial Sequence
  Description of Artificial Sequence: Synthetic oligonucleotide
guaaagauuaccauagauuuaaaaa

SEQ ID NO: 947 - RNA, 25 nt, Artificial Sequence
  Description of Artificial Sequence: Synthetic oligonucleotide
uguaaagauuaccauagauuuaaaa

SEQ ID NO: 948 - RNA, 25 nt, Artificial Sequence
  Description of Artificial Sequence: Synthetic oligonucleotide
uuguaaagauuaccauagauuuaaa

SEQ ID NO: 949 - RNA, 25 nt, Artificial Sequence
  Description of Artificial Sequence: Synthetic oligonucleotide
uuuguaaagauuaccauagauuuaa

SEQ ID NO: 950 - RNA, 25 nt, Artificial Sequence
  Description of Artificial Sequence: Synthetic oligonucleotide
uuuuguaaagauuaccauagauuua

SEQ ID NO: 951 - RNA, 25 nt, Artificial Sequence
  Description of Artificial Sequence: Synthetic oligonucleotide
auuuuguaaagauuaccauagauuu

SEQ ID NO: 952 - RNA, 25 nt, Artificial Sequence
  Description of Artificial Sequence: Synthetic oligonucleotide
uauuuuguaaagauuaccauagauu

SEQ ID NO: 953 - RNA, 25 nt, Artificial Sequence
  Description of Artificial Sequence: Synthetic oligonucleotide
auauuuuguaaagauuaccauagau

SEQ ID NO: 954 - RNA, 25 nt, Artificial Sequence
  Description of Artificial Sequence: Synthetic oligonucleotide
aauauuuuguaaagauuaccauaga

SEQ ID NO: 955 - RNA, 25 nt, Artificial Sequence
  Description of Artificial Sequence: Synthetic oligonucleotide
aaauauuuuguaaagauuaccauag

SEQ ID NO: 956 - RNA, 25 nt, Artificial Sequence
  Description of Artificial Sequence: Synthetic oligonucleotide
aaaauauuuuguaaagauuaccaua

SEQ ID NO: 957 - RNA, 25 nt, Artificial Sequence
  Description of Artificial Sequence: Synthetic oligonucleotide
uaaaauauuuuguaaagauuaccau

SEQ ID NO: 958 - RNA, 25 nt, Artificial Sequence
  Description of Artificial Sequence: Synthetic oligonucleotide
guaaaauauuuuguaaagauuacca

SEQ ID NO: 959 - RNA, 25 nt, Artificial Sequence
  Description of Artificial Sequence: Synthetic oligonucleotide
aguaaaauauuuuguaaagauuacc

SEQ ID NO: 960 - RNA, 25 nt, Artificial Sequence
  Description of Artificial Sequence: Synthetic oligonucleotide
aaguaaaauauuuuguaaagauuac

SEQ ID NO: 961 - RNA, 25 nt, Artificial Sequence
  Description of Artificial Sequence: Synthetic oligonucleotide
gaaguaaaauauuuuguaaagauua

SEQ ID NO: 962 - RNA, 25 nt, Artificial Sequence
  Description of Artificial Sequence: Synthetic oligonucleotide
ggaaguaaaauauuuuguaaagauu

SEQ ID NO: 963 - RNA, 25 nt, Artificial Sequence
  Description of Artificial Sequence: Synthetic oligonucleotide
cggaaguaaaauauuuuguaaagau

SEQ ID NO: 964 - RNA, 25 nt, Artificial Sequence
  Description of Artificial Sequence: Synthetic oligonucleotide
ucggaaguaaaauauuuuguaaaga

SEQ ID NO: 965 - RNA, 25 nt, Artificial Sequence
  Description of Artificial Sequence: Synthetic oligonucleotide
uucggaaguaaaauauuuuguaaag

SEQ ID NO: 966 - RNA, 25 nt, Artificial Sequence
  Description of Artificial Sequence: Synthetic oligonucleotide
guucggaaguaaaauauuuuguaaa

SEQ ID NO: 967 - RNA, 25 nt, Artificial Sequence
  Description of Artificial Sequence: Synthetic oligonucleotide
aguucggaaguaaaauauuuuguaa

SEQ ID NO: 968 - RNA, 25 nt, Artificial Sequence
  Description of Artificial Sequence: Synthetic oligonucleotide
gaguucggaaguaaaauauuuugua

SEQ ID NO: 969 - RNA, 25 nt, Artificial Sequence
  Description of Artificial Sequence: Synthetic oligonucleotide
ugaguucggaaguaaaauauuuugu

SEQ ID NO: 970 - RNA, 25 nt, Artificial Sequence
  Description of Artificial Sequence: Synthetic oligonucleotide
augaguucggaaguaaaauauuuug

SEQ ID NO: 971 - RNA, 25 nt, Artificial Sequence
  Description of Artificial Sequence: Synthetic oligonucleotide
uaugaguucggaaguaaaauauuuu

SEQ ID NO: 972 - RNA, 25 nt, Artificial Sequence
  Description of Artificial Sequence: Synthetic oligonucleotide
auaugaguucggaaguaaaauauuu

SEQ ID NO: 973 - RNA, 25 nt, Artificial Sequence
  Description of Artificial Sequence: Synthetic oligonucleotide
uauaugaguucggaaguaaaauauu

SEQ ID NO: 974 - RNA, 25 nt, Artificial Sequence
  Description of Artificial Sequence: Synthetic oligonucleotide
guauaugaguucggaaguaaaauau

SEQ ID NO: 975 - RNA, 25 nt, Artificial Sequence
  Description of Artificial Sequence: Synthetic oligonucleotide
gguauaugaguucggaaguaaaaua

SEQ ID NO: 976 - RNA, 25 nt, Artificial Sequence
  Description of Artificial Sequence: Synthetic oligonucleotide
agguauaugaguucggaaguaaaau

SEQ ID NO: 977 - RNA, 25 nt, Artificial Sequence
  Description of Artificial Sequence: Synthetic oligonucleotide
cagguauaugaguucggaaguaaaa

SEQ ID NO: 978 - RNA, 25 nt, Artificial Sequence
  Description of Artificial Sequence: Synthetic oligonucleotide
ccagguauaugaguucggaaguaaa

SEQ ID NO: 979 - RNA, 25 nt, Artificial Sequence
  Description of Artificial Sequence: Synthetic oligonucleotide
cccagguauaugaguucggaaguaa

SEQ ID NO: 980 - RNA, 25 nt, Artificial Sequence
  Description of Artificial Sequence: Synthetic oligonucleotide
ccccagguauaugaguucggaagua

SEQ ID NO: 981 - RNA, 25 nt, Artificial Sequence
  Description of Artificial Sequence: Synthetic oligonucleotide
uccccagguauaugaguucggaagu

SEQ ID NO: 982 - RNA, 25 nt, Artificial Sequence
  Description of Artificial Sequence: Synthetic oligonucleotide
auccccagguauaugaguucggaag

SEQ ID NO: 983 - RNA, 25 nt, Artificial Sequence
  Description of Artificial Sequence: Synthetic oligonucleotide
aauccccagguauaugaguucggaa

SEQ ID NO: 984 - RNA, 25 nt, Artificial Sequence
  Description of Artificial Sequence: Synthetic oligonucleotide
aaauccccagguauaugaguucgga

SEQ ID NO: 985 - RNA, 25 nt, Artificial Sequence
  Description of Artificial Sequence: Synthetic oligonucleotide
aaaauccccagguauaugaguucgg

SEQ ID NO: 986 - RNA, 25 nt, Artificial Sequence
  Description of Artificial Sequence: Synthetic oligonucleotide
uaaaauccccagguauaugaguucg

SEQ ID NO: 987 - RNA, 25 nt, Artificial Sequence
  Description of Artificial Sequence: Synthetic oligonucleotide
auaaaauccccagguauaugaguuc

SEQ ID NO: 988 - RNA, 25 nt, Artificial Sequence
  Description of Artificial Sequence: Synthetic oligonucleotide
aauaaaauccccagguauaugaguu

SEQ ID NO: 989 - RNA, 25 nt, Artificial Sequence
  Description of Artificial Sequence: Synthetic oligonucleotide
uaauaaaauccccagguauaugagu

SEQ ID NO: 990 - RNA, 25 nt, Artificial Sequence
  Description of Artificial Sequence: Synthetic oligonucleotide
guaauaaaauccccagguauaugag

SEQ ID NO: 991 - RNA, 25 nt, Artificial Sequence
  Description of Artificial Sequence: Synthetic oligonucleotide
aguaauaaaauccccagguauauga

SEQ ID NO: 992 - RNA, 25 nt, Artificial Sequence
  Description of Artificial Sequence: Synthetic oligonucleotide
gaguaauaaaauccccagguauaug

SEQ ID NO: 993 - RNA, 25 nt, Artificial Sequence
  Description of Artificial Sequence: Synthetic oligonucleotide
agaguaauaaaauccccagguauau

SEQ ID NO: 994 - RNA, 25 nt, Artificial Sequence
  Description of Artificial Sequence: Synthetic oligonucleotide
cagaguaauaaaauccccagguaua

SEQ ID NO: 995 - RNA, 25 nt, Artificial Sequence
  Description of Artificial Sequence: Synthetic oligonucleotide
ccagaguaauaaaauccccagguau

SEQ ID NO: 996 - RNA, 25 nt, Artificial Sequence
  Description of Artificial Sequence: Synthetic oligonucleotide
cccagaguaauaaaauccccaggua

SEQ ID NO: 997 - RNA, 25 nt, Artificial Sequence
  Description of Artificial Sequence: Synthetic oligonucleotide
ucccagaguaauaaaauccccaggu

SEQ ID NO: 998 - RNA, 25 nt, Artificial Sequence
  Description of Artificial Sequence: Synthetic oligonucleotide
uucccagaguaauaaaauccccagg

SEQ ID NO: 999 - RNA, 25 nt, Artificial Sequence
  Description of Artificial Sequence: Synthetic oligonucleotide
auucccagaguaauaaaauccccag

SEQ ID NO: 1000 - RNA, 25 nt, Artificial Sequence
  Description of Artificial Sequence: Synthetic oligonucleotide
aauucccagaguaauaaaaucccca

SEQ ID NO: 1001 - RNA, 25 nt, Artificial Sequence
  Description of Artificial Sequence: Synthetic oligonucleotide
uaauucccagaguaauaaaaucccc

SEQ ID NO: 1002 - RNA, 25 nt, Artificial Sequence
  Description of Artificial Sequence: Synthetic oligonucleotide
auaauucccagaguaauaaaauccc

SEQ ID NO: 1003 - RNA, 25 nt, Artificial Sequence
  Description of Artificial Sequence: Synthetic oligonucleotide
cauaauucccagaguaauaaaaucc

SEQ ID NO: 1004 - RNA, 25 nt, Artificial Sequence
  Description of Artificial Sequence: Synthetic oligonucleotide
acauaauucccagaguaauaaaauc

SEQ ID NO: 1005 - RNA, 25 nt, Artificial Sequence
  Description of Artificial Sequence: Synthetic oligonucleotide
cacauaauucccagaguaauaaaau

SEQ ID NO: 1006 - RNA, 25 nt, Artificial Sequence
  Description of Artificial Sequence: Synthetic oligonucleotide
acacauaauucccagaguaauaaaa

SEQ ID NO: 1007 - RNA, 25 nt, Artificial Sequence
  Description of Artificial Sequence: Synthetic oligonucleotide
aacacauaauucccagaguaauaaa

SEQ ID NO: 1008 - RNA, 25 nt, Artificial Sequence
  Description of Artificial Sequence: Synthetic oligonucleotide
gaacacauaauucccagaguaauaa

SEQ ID NO: 1009 - RNA, 25 nt, Artificial Sequence
  Description of Artificial Sequence: Synthetic oligonucleotide
agaacacauaauucccagaguaaua

SEQ ID NO: 1010 - RNA, 25 nt, Artificial Sequence
  Description of Artificial Sequence: Synthetic oligonucleotide
cagaacacauaauucccagaguaau

SEQ ID NO: 1011 - RNA, 25 nt, Artificial Sequence
  Description of Artificial Sequence: Synthetic oligonucleotide
gcagaacacauaauucccagaguaa

SEQ ID NO: 1012 - RNA, 25 nt, Artificial Sequence
  Description of Artificial Sequence: Synthetic oligonucleotide
ggcagaacacauaauucccagagua

SEQ ID NO: 1013 - RNA, 25 nt, Artificial Sequence
  Description of Artificial Sequence: Synthetic oligonucleotide
gggcagaacacauaauucccagagu

SEQ ID NO: 1014 - RNA, 25 nt, Artificial Sequence
  Description of Artificial Sequence: Synthetic oligonucleotide
ggggcagaacacauaauucccagag

SEQ ID NO: 1015 - RNA, 25 nt, Artificial Sequence
  Description of Artificial Sequence: Synthetic oligonucleotide
uggggcagaacacauaauucccaga

SEQ ID NO: 1016 - RNA, 25 nt, Artificial Sequence
  Description of Artificial Sequence: Synthetic oligonucleotide
auggggcagaacacauaauucccag

SEQ ID NO: 1017 - RNA, 25 nt, Artificial Sequence
  Description of Artificial Sequence: Synthetic oligonucleotide
gauggggcagaacacauaauuccca

SEQ ID NO: 1018 - RNA, 25 nt, Artificial Sequence
  Description of Artificial Sequence: Synthetic oligonucleotide
ugauggggcagaacacauaauuccc

SEQ ID NO: 1019 - RNA, 25 nt, Artificial Sequence
  Description of Artificial Sequence: Synthetic oligonucleotide
gugauggggcagaacacauaauucc

SEQ ID NO: 1020 - RNA, 25 nt, Artificial Sequence
  Description of Artificial Sequence: Synthetic oligonucleotide
agugauggggcagaacacauaauuc

SEQ ID NO: 1021 - RNA, 25 nt, Artificial Sequence
  Description of Artificial Sequence: Synthetic oligonucleotide
gagugauggggcagaacacauaauu

SEQ ID NO: 1022 - RNA, 25 nt, Artificial Sequence
  Description of Artificial Sequence: Synthetic oligonucleotide
agagugauggggcagaacacauaau

SEQ ID NO: 1023 - RNA, 25 nt, Artificial Sequence
  Description of Artificial Sequence: Synthetic oligonucleotide
gagagugauggggcagaacacauaa

SEQ ID NO: 1024 - RNA, 25 nt, Artificial Sequence
  Description of Artificial Sequence: Synthetic oligonucleotide
agagagugauggggcagaacacaua

SEQ ID NO: 1025 - RNA, 25 nt, Artificial Sequence
  Description of Artificial Sequence: Synthetic oligonucleotide
gagagagugauggggcagaacacau

SEQ ID NO: 1026 - RNA, 25 nt, Artificial Sequence
  Description of Artificial Sequence: Synthetic oligonucleotide
agagagagugauggggcagaacaca

SEQ ID NO: 1027 - RNA, 25 nt, Artificial Sequence
  Description of Artificial Sequence: Synthetic oligonucleotide
aagagagagugauggggcagaacac

SEQ ID NO: 1028 - RNA, 25 nt, Artificial Sequence
  Description of Artificial Sequence: Synthetic oligonucleotide
uaagagagagugauggggcagaaca

SEQ ID NO: 1029 - RNA, 25 nt, Artificial Sequence
  Description of Artificial Sequence: Synthetic oligonucleotide
uuaagagagagugauggggcagaac

SEQ ID NO: 1030 - RNA, 25 nt, Artificial Sequence
  Description of Artificial Sequence: Synthetic oligonucleotide
auuaagagagagugauggggcagaa

SEQ ID NO: 1031 - RNA, 25 nt, Artificial Sequence
  Description of Artificial Sequence: Synthetic oligonucleotide
aauuaagagagagugauggggcaga

SEQ ID NO: 1032 - RNA, 25 nt, Artificial Sequence
  Description of Artificial Sequence: Synthetic oligonucleotide
caauuaagagagagugauggggcag

SEQ ID NO: 1033 - RNA, 25 nt, Artificial Sequence
  Description of Artificial Sequence: Synthetic oligonucleotide
ccaauuaagagagagugauggggca

SEQ ID NO: 1034 - RNA, 25 nt, Artificial Sequence
  Description of Artificial Sequence: Synthetic oligonucleotide
uccaauuaagagagagugauggggc

SEQ ID NO: 1035 - RNA, 25 nt, Artificial Sequence
  Description of Artificial Sequence: Synthetic oligonucleotide
auccaauuaagagagagugaugggg

SEQ ID NO: 1036 - RNA, 25 nt, Artificial Sequence
  Description of Artificial Sequence: Synthetic oligonucleotide
aauccaauuaagagagagugauggg

SEQ ID NO: 1037 - RNA, 25 nt, Artificial Sequence
  Description of Artificial Sequence: Synthetic oligonucleotide
aaauccaauuaagagagagugaugg

SEQ ID NO: 1038 - RNA, 25 nt, Artificial Sequence
  Description of Artificial Sequence: Synthetic oligonucleotide
aaaauccaauuaagagagagugaug

SEQ ID NO: 1039 - RNA, 25 nt, Artificial Sequence
  Description of Artificial Sequence: Synthetic oligonucleotide
aaaaauccaauuaagagagagugau

SEQ ID NO: 1040 - RNA, 25 nt, Artificial Sequence
  Description of Artificial Sequence: Synthetic oligonucleotide
uaaaaauccaauuaagagagaguga

SEQ ID NO: 1041 - RNA, 25 nt, Artificial Sequence
  Description of Artificial Sequence: Synthetic oligonucleotide
uuaaaaauccaauuaagagagagug

SEQ ID NO: 1042 - RNA, 25 nt, Artificial Sequence
  Description of Artificial Sequence: Synthetic oligonucleotide
uuuaaaaauccaauuaagagagagu

SEQ ID NO: 1043 - RNA, 25 nt, Artificial Sequence
  Description of Artificial Sequence: Synthetic oligonucleotide
uuuuaaaaauccaauuaagagagag

SEQ ID NO: 1044 - RNA, 25 nt, Artificial Sequence
  Description of Artificial Sequence: Synthetic oligonucleotide
auuuuaaaaauccaauuaagagaga

SEQ ID NO: 1045 - RNA, 25 nt, Artificial Sequence
  Description of Artificial Sequence: Synthetic oligonucleotide
aauuuuaaaaauccaauuaagagag

SEQ ID NO: 1046 - RNA, 25 nt, Artificial Sequence
  Description of Artificial Sequence: Synthetic oligonucleotide
uaauuuuaaaaauccaauuaagaga

SEQ ID NO: 1047 - RNA, 25 nt, Artificial Sequence
  Description of Artificial Sequence: Synthetic oligonucleotide
auaauuuuaaaaauccaauuaagag

SEQ ID NO: 1048 - RNA, 25 nt, Artificial Sequence
  Description of Artificial Sequence: Synthetic oligonucleotide
uauaauuuuaaaaauccaauuaaga

SEQ ID NO: 1049 - RNA, 25 nt, Artificial Sequence
  Description of Artificial Sequence: Synthetic oligonucleotide
auauaauuuuaaaaauccaauuaag

SEQ ID NO: 1050 - RNA, 25 nt, Artificial Sequence
  Description of Artificial Sequence: Synthetic oligonucleotide
aauauaauuuuaaaaauccaauuaa

SEQ ID NO: 1051 - RNA, 25 nt, Artificial Sequence
  Description of Artificial Sequence: Synthetic oligonucleotide
gaauauaauuuuaaaaauccaauua

SEQ ID NO: 1052 - RNA, 25 nt, Artificial Sequence
  Description of Artificial Sequence: Synthetic oligonucleotide
ugaauauaauuuuaaaaauccaauu

SEQ ID NO: 1053 - RNA, 25 nt, Artificial Sequence
  Description of Artificial Sequence: Synthetic oligonucleotide
augaauauaauuuuaaaaauccaau

SEQ ID NO: 1054 - RNA, 25 nt, Artificial Sequence
  Description of Artificial Sequence: Synthetic oligonucleotide
uaugaauauaauuuuaaaaauccaa

SEQ ID NO: 1055 - RNA, 25 nt, Artificial Sequence
  Description of Artificial Sequence: Synthetic oligonucleotide
auaugaauauaauuuuaaaaaucca

SEQ ID NO: 1056 - RNA, 25 nt, Artificial Sequence
  Description of Artificial Sequence: Synthetic oligonucleotide
aauaugaauauaauuuuaaaaaucc

SEQ ID NO: 1057 - RNA, 25 nt, Artificial Sequence
  Description of Artificial Sequence: Synthetic oligonucleotide
caauaugaauauaauuuuaaaaauc

SEQ ID NO: 1058 - RNA, 25 nt, Artificial Sequence
  Description of Artificial Sequence: Synthetic oligonucleotide
gcaauaugaauauaauuuuaaaaau

SEQ ID NO: 1059 - RNA, 25 nt, Artificial Sequence
  Description of Artificial Sequence: Synthetic oligonucleotide
ugcaauaugaauauaauuuuaaaaa

SEQ ID NO: 1060 - RNA, 25 nt, Artificial Sequence
  Description of Artificial Sequence: Synthetic oligonucleotide
cugcaauaugaauauaauuuuaaaa

SEQ ID NO: 1061 - RNA, 25 nt, Artificial Sequence
  Description of Artificial Sequence: Synthetic oligonucleotide
ccugcaauaugaauauaauuuuaaa

SEQ ID NO: 1062 - RNA, 25 nt, Artificial Sequence
  Description of Artificial Sequence: Synthetic oligonucleotide
uccugcaauaugaauauaauuuuaa

SEQ ID NO: 1063 - RNA, 25 nt, Artificial Sequence
  Description of Artificial Sequence: Synthetic oligonucleotide
guccugcaauaugaauauaauuuua

SEQ ID NO: 1064 - RNA, 25 nt, Artificial Sequence
  Description of Artificial Sequence: Synthetic oligonucleotide
aguccugcaauaugaauauaauuuu

SEQ ID NO: 1065 - RNA, 25 nt, Artificial Sequence
  Description of Artificial Sequence: Synthetic oligonucleotide
gaguccugcaauaugaauauaauuu

SEQ ID NO: 1066 - RNA, 25 nt, Artificial Sequence
  Description of Artificial Sequence: Synthetic oligonucleotide
cgaguccugcaauaugaauauaauu

SEQ ID NO: 1067 - RNA, 25 nt, Artificial Sequence
  Description of Artificial Sequence: Synthetic oligonucleotide
ccgaguccugcaauaugaauauaau

SEQ ID NO: 1068 - RNA, 25 nt, Artificial Sequence
  Description of Artificial Sequence: Synthetic oligonucleotide
gccgaguccugcaauaugaauauaa

SEQ ID NO: 1069 - RNA, 25 nt, Artificial Sequence
  Description of Artificial Sequence: Synthetic oligonucleotide
ugccgaguccugcaauaugaauaua

SEQ ID NO: 1070 - RNA, 25 nt, Artificial Sequence
  Description of Artificial Sequence: Synthetic oligonucleotide
cugccgaguccugcaauaugaauau

SEQ ID NO: 1071 - RNA, 25 nt, Artificial Sequence
  Description of Artificial Sequence: Synthetic oligonucleotide
ucugccgaguccugcaauaugaaua

SEQ ID NO: 1072 - RNA, 25 nt, Artificial Sequence
  Description of Artificial Sequence: Synthetic oligonucleotide
uucugccgaguccugcaauaugaau

SEQ ID NO: 1073 - RNA, 25 nt, Artificial Sequence
  Description of Artificial Sequence: Synthetic oligonucleotide
cuucugccgaguccugcaauaugaa

SEQ ID NO: 1074 - RNA, 25 nt, Artificial Sequence
  Description of Artificial Sequence: Synthetic oligonucleotide
ucuucugccgaguccugcaauauga

SEQ ID NO: 1075 - RNA, 25 nt, Artificial Sequence
  Description of Artificial Sequence: Synthetic oligonucleotide
gucuucugccgaguccugcaauaug

SEQ ID NO: 1076 - RNA, 25 nt, Artificial Sequence
  Description of Artificial Sequence: Synthetic oligonucleotide
ggucuucugccgaguccugcaauau

SEQ ID NO: 1077 - RNA, 25 nt, Artificial Sequence
  Description of Artificial Sequence: Synthetic oligonucleotide
aggucuucugccgaguccugcaaua

SEQ ID NO: 1078 - RNA, 25 nt, Artificial Sequence
  Description of Artificial Sequence: Synthetic oligonucleotide
aaggucuucugccgaguccugcaau

SEQ ID NO: 1079 - RNA, 25 nt, Artificial Sequence
  Description of Artificial Sequence: Synthetic oligonucleotide
gaaggucuucugccgaguccugcaa

SEQ ID NO: 1080 - RNA, 25 nt, Artificial Sequence
  Description of Artificial Sequence: Synthetic oligonucleotide
cgaaggucuucugccgaguccugca

SEQ ID NO: 1081 - RNA, 25 nt, Artificial Sequence
  Description of Artificial Sequence: Synthetic oligonucleotide
ucgaaggucuucugccgaguccugc

SEQ ID NO: 1082 - RNA, 25 nt, Artificial Sequence
  Description of Artificial Sequence: Synthetic oligonucleotide
cucgaaggucuucugccgaguccug

SEQ ID NO: 1083 - RNA, 25 nt, Artificial Sequence
  Description of Artificial Sequence: Synthetic oligonucleotide
ucucgaaggucuucugccgaguccu

SEQ ID NO: 1084 - RNA, 25 nt, Artificial Sequence
  Description of Artificial Sequence: Synthetic oligonucleotide
cucucgaaggucuucugccgagucc

SEQ ID NO: 1085 - RNA, 25 nt, Artificial Sequence
  Description of Artificial Sequence: Synthetic oligonucleotide
ucucucgaaggucuucugccgaguc

SEQ ID NO: 1086 - RNA, 25 nt, Artificial Sequence
  Description of Artificial Sequence: Synthetic oligonucleotide
uucucucgaaggucuucugccgagu

SEQ ID NO: 1087 - RNA, 25 nt, Artificial Sequence
  Description of Artificial Sequence: Synthetic oligonucleotide
uuucucucgaaggucuucugccgag

SEQ ID NO: 1088 - RNA, 25 nt, Artificial Sequence
  Description of Artificial Sequence: Synthetic oligonucleotide
cuuucucucgaaggucuucugccga

SEQ ID NO: 1089 - RNA, 25 nt, Artificial Sequence
  Description of Artificial Sequence: Synthetic oligonucleotide
ccuuucucucgaaggucuucugccg

SEQ ID NO: 1090 - RNA, 25 nt, Artificial Sequence
  Description of Artificial Sequence: Synthetic oligonucleotide
accuuucucucgaaggucuucugcc

SEQ ID NO: 1091 - RNA, 25 nt, Artificial Sequence
  Description of Artificial Sequence: Synthetic oligonucleotide
uaccuuucucucgaaggucuucugc

SEQ ID NO: 1092 - RNA, 25 nt, Artificial Sequence
  Description of Artificial Sequence: Synthetic oligonucleotide
cuaccuuucucucgaaggucuucug

SEQ ID NO: 1093 - RNA, 25 nt, Artificial Sequence
  Description of Artificial Sequence: Synthetic oligonucleotide
ucuaccuuucucucgaaggucuucu

SEQ ID NO: 1094 - RNA, 25 nt, Artificial Sequence
  Description of Artificial Sequence: Synthetic oligonucleotide
uucuaccuuucucucgaaggucuuc

SEQ ID NO: 1095 - RNA, 25 nt, Artificial Sequence
  Description of Artificial Sequence: Synthetic oligonucleotide
uuucuaccuuucucucgaaggucuu

SEQ ID NO: 1096 - RNA, 25 nt, Artificial Sequence
  Description of Artificial Sequence: Synthetic oligonucleotide
uuuucuaccuuucucucgaaggucu

SEQ ID NO: 1097 - RNA, 25 nt, Artificial Sequence
  Description of Artificial Sequence: Synthetic oligonucleotide
auuuucuaccuuucucucgaagguc

SEQ ID NO: 1098 - RNA, 25 nt, Artificial Sequence
  Description of Artificial Sequence: Synthetic oligonucleotide
uauuuucuaccuuucucucgaaggu

SEQ ID NO: 1099 - RNA, 25 nt, Artificial Sequence
  Description of Artificial Sequence: Synthetic oligonucleotide
uuauuuucuaccuuucucucgaagg

SEQ ID NO: 1100 - RNA, 25 nt, Artificial Sequence
  Description of Artificial Sequence: Synthetic oligonucleotide
cuuauuuucuaccuuucucucgaag

SEQ ID NO: 1101 - RNA, 25 nt, Artificial Sequence
  Description of Artificial Sequence: Synthetic oligonucleotide
ucuuauuuucuaccuuucucucgaa

SEQ ID NO: 1102 - RNA, 25 nt, Artificial Sequence
  Description of Artificial Sequence: Synthetic oligonucleotide
uucuuauuuucuaccuuucucucga

SEQ ID NO: 1103 - RNA, 25 nt, Artificial Sequence
  Description of Artificial Sequence: Synthetic oligonucleotide
auucuuauuuucuaccuuucucucg

SEQ ID NO: 1104 - RNA, 25 nt, Artificial Sequence
  Description of Artificial Sequence: Synthetic oligonucleotide
aauucuuauuuucuaccuuucucuc

SEQ ID NO: 1105 - RNA, 25 nt, Artificial Sequence
  Description of Artificial Sequence: Synthetic oligonucleotide
aaauucuuauuuucuaccuuucucu

SEQ ID NO: 1106 - RNA, 25 nt, Artificial Sequence
  Description of Artificial Sequence: Synthetic oligonucleotide
caaauucuuauuuucuaccuuucuc

SEQ ID NO: 1107 - RNA, 25 nt, Artificial Sequence
  Description of Artificial Sequence: Synthetic oligonucleotide
ccaaauucuuauuuucuaccuuucu

SEQ ID NO: 1108 - RNA, 25 nt, Artificial Sequence
  Description of Artificial Sequence: Synthetic oligonucleotide
gccaaauucuuauuuucuaccuuuc

SEQ ID NO: 1109 - RNA, 25 nt, Artificial Sequence
  Description of Artificial Sequence: Synthetic oligonucleotide
agccaaauucuuauuuucuaccuuu

SEQ ID NO: 1110 - RNA, 25 nt, Artificial Sequence
  Description of Artificial Sequence: Synthetic oligonucleotide
gagccaaauucuuauuuucuaccuu

SEQ ID NO: 1111 - RNA, 25 nt, Artificial Sequence
  Description of Artificial Sequence: Synthetic oligonucleotide
agagccaaauucuuauuuucuaccu

SEQ ID NO: 1112 - RNA, 25 nt, Artificial Sequence
  Description of Artificial Sequence: Synthetic oligonucleotide
gagagccaaauucuuauuuucuacc

SEQ ID NO: 1113 - RNA, 25 nt, Artificial Sequence
  Description of Artificial Sequence: Synthetic oligonucleotide
agagagccaaauucuuauuuucuac

SEQ ID NO: 1114 - RNA, 25 nt, Artificial Sequence
  Description of Artificial Sequence: Synthetic oligonucleotide
cagagagccaaauucuuauuuucua

SEQ ID NO: 1115 - RNA, 25 nt, Artificial Sequence
  Description of Artificial Sequence: Synthetic oligonucleotide
acagagagccaaauucuuauuuucu

SEQ ID NO: 1116 - RNA, 25 nt, Artificial Sequence
  Description of Artificial Sequence: Synthetic oligonucleotide
cacagagagccaaauucuuauuuuc

SEQ ID NO: 1117 - RNA, 25 nt, Artificial Sequence
  Description of Artificial Sequence: Synthetic oligonucleotide
acacagagagccaaauucuuauuuu

SEQ ID NO: 1118 - RNA, 25 nt, Artificial Sequence
  Description of Artificial Sequence: Synthetic oligonucleotide
cacacagagagccaaauucuuauuu

SEQ ID NO: 1119 - RNA, 25 nt, Artificial Sequence
  Description of Artificial Sequence: Synthetic oligonucleotide
ucacacagagagccaaauucuuauu

SEQ ID NO: 1120 - RNA, 25 nt, Artificial Sequence
  Description of Artificial Sequence: Synthetic oligonucleotide
cucacacagagagccaaauucuuau

SEQ ID NO: 1121 - RNA, 25 nt, Artificial Sequence
  Description of Artificial Sequence: Synthetic oligonucleotide
gcucacacagagagccaaauucuua

SEQ ID NO: 1122 - RNA, 25 nt, Artificial Sequence
  Description of Artificial Sequence: Synthetic oligonucleotide
ugcucacacagagagccaaauucuu

SEQ ID NO: 1123 - RNA, 25 nt, Artificial Sequence
  Description of Artificial Sequence: Synthetic oligonucleotide
augcucacacagagagccaaauucu

SEQ ID NO: 1124 - RNA, 25 nt, Artificial Sequence
  Description of Artificial Sequence: Synthetic oligonucleotide
caugcucacacagagagccaaauuc

SEQ ID NO: 1125 - RNA, 25 nt, Artificial Sequence
  Description of Artificial Sequence: Synthetic oligonucleotide
acaugcucacacagagagccaaauu

SEQ ID NO: 1126 - RNA, 25 nt, Artificial Sequence
  Description of Artificial Sequence: Synthetic oligonucleotide
cacaugcucacacagagagccaaau

SEQ ID NO: 1127 - RNA, 25 nt, Artificial Sequence
  Description of Artificial Sequence: Synthetic oligonucleotide
acacaugcucacacagagagccaaa

SEQ ID NO: 1128 - RNA, 25 nt, Artificial Sequence
  Description of Artificial Sequence: Synthetic oligonucleotide
cacacaugcucacacagagagccaa

SEQ ID NO: 1129 - RNA, 25 nt, Artificial Sequence
  Description of Artificial Sequence: Synthetic oligonucleotide
gcacacaugcucacacagagagcca

SEQ ID NO: 1130 - RNA, 25 nt, Artificial Sequence
  Description of Artificial Sequence: Synthetic oligonucleotide
cgcacacaugcucacacagagagcc

SEQ ID NO: 1131 - RNA, 25 nt, Artificial Sequence
  Description of Artificial Sequence: Synthetic oligonucleotide
acgcacacaugcucacacagagagc

SEQ ID NO: 1132 - RNA, 25 nt, Artificial Sequence
  Description of Artificial Sequence: Synthetic oligonucleotide
cacgcacacaugcucacacagagag

SEQ ID NO: 1133 - RNA, 25 nt, Artificial Sequence
  Description of Artificial Sequence: Synthetic oligonucleotide
acacgcacacaugcucacacagaga

SEQ ID NO: 1134 - RNA, 25 nt, Artificial Sequence
  Description of Artificial Sequence: Synthetic oligonucleotide
cacacgcacacaugcucacacagag

SEQ ID NO: 1135 - RNA, 25 nt, Artificial Sequence
  Description of Artificial Sequence: Synthetic oligonucleotide
acacacgcacacaugcucacacaga

SEQ ID NO: 1136 - RNA, 25 nt, Artificial Sequence
  Description of Artificial Sequence: Synthetic oligonucleotide
cacacacgcacacaugcucacacag

SEQ ID NO: 1137 - RNA, 25 nt, Artificial Sequence
  Description of Artificial Sequence: Synthetic oligonucleotide
gcacacacgcacacaugcucacaca

SEQ ID NO: 1138 - RNA, 25 nt, Artificial Sequence
  Description of Artificial Sequence: Synthetic oligonucleotide
cgcacacacgcacacaugcucacac

SEQ ID NO: 1139 - RNA, 25 nt, Artificial Sequence
  Description of Artificial Sequence: Synthetic oligonucleotide
ucgcacacacgcacacaugcucaca

SEQ ID NO: 1140 - RNA, 25 nt, Artificial Sequence
  Description of Artificial Sequence: Synthetic oligonucleotide
cucgcacacacgcacacaugcucac

SEQ ID NO: 1141 - RNA, 25 nt, Artificial Sequence
  Description of Artificial Sequence: Synthetic oligonucleotide
ucucgcacacacgcacacaugcuca

SEQ ID NO: 1142 - RNA, 25 nt, Artificial Sequence
  Description of Artificial Sequence: Synthetic oligonucleotide
cucucgcacacacgcacacaugcuc

SEQ ID NO: 1143 - RNA, 25 nt, Artificial Sequence
  Description of Artificial Sequence: Synthetic oligonucleotide
ucucucgcacacacgcacacaugcu

SEQ ID NO: 1144 - RNA, 25 nt, Artificial Sequence
  Description of Artificial Sequence: Synthetic oligonucleotide
cucucucgcacacacgcacacaugc

SEQ ID NO: 1145 - RNA, 25 nt, Artificial Sequence
  Description of Artificial Sequence: Synthetic oligonucleotide
ucucucucgcacacacgcacacaug

SEQ ID NO: 1146 - RNA, 25 nt, Artificial Sequence
  Description of Artificial Sequence: Synthetic oligonucleotide
cucucucucgcacacacgcacacau

SEQ ID NO: 1147 - RNA, 25 nt, Artificial Sequence
  Description of Artificial Sequence: Synthetic oligonucleotide
ucucucucucgcacacacgcacaca

SEQ ID NO: 1148 - RNA, 25 nt, Artificial Sequence
  Description of Artificial Sequence: Synthetic oligonucleotide
cucucucucucgcacacacgcacac

SEQ ID NO: 1149 - RNA, 25 nt, Artificial Sequence
  Description of Artificial Sequence: Synthetic oligonucleotide
ucucucucucucgcacacacgcaca

SEQ ID NO: 1150 - RNA, 25 nt, Artificial Sequence
  Description of Artificial Sequence: Synthetic oligonucleotide
gucucucucucucgcacacacgcac

SEQ ID NO: 1151 - RNA, 25 nt, Artificial Sequence
  Description of Artificial Sequence: Synthetic oligonucleotide
ugucucucucucucgcacacacgca

SEQ ID NO: 1152 - RNA, 25 nt, Artificial Sequence
  Description of Artificial Sequence: Synthetic oligonucleotide
cugucucucucucucgcacacacgc

SEQ ID NO: 1153 - RNA, 25 nt, Artificial Sequence
  Description of Artificial Sequence: Synthetic oligonucleotide
ucugucucucucucucgcacacacg

SEQ ID NO: 1154 - RNA, 25 nt, Artificial Sequence
  Description of Artificial Sequence: Synthetic oligonucleotide
gucugucucucucucucgcacacac

SEQ ID NO: 1155 - RNA, 25 nt, Artificial Sequence
  Description of Artificial Sequence: Synthetic oligonucleotide
ugucugucucucucucucgcacaca

SEQ ID NO: 1156 - RNA, 25 nt, Artificial Sequence
  Description of Artificial Sequence: Synthetic oligonucleotide
cugucugucucucucucucgcacac

SEQ ID NO: 1157 - RNA, 25 nt, Artificial Sequence
  Description of Artificial Sequence: Synthetic oligonucleotide
gcugucugucucucucucucgcaca

SEQ ID NO: 1158 - RNA, 25 nt, Artificial Sequence
  Description of Artificial Sequence: Synthetic oligonucleotide
ggcugucugucucucucucucgcac

SEQ ID NO: 1159 - RNA, 25 nt, Artificial Sequence
  Description of Artificial Sequence: Synthetic oligonucleotide
aggcugucugucucucucucucgca

SEQ ID NO: 1160 - RNA, 25 nt, Artificial Sequence
  Description of Artificial Sequence: Synthetic oligonucleotide
caggcugucugucucucucucucgc

SEQ ID NO: 1161 - RNA, 25 nt, Artificial Sequence
  Description of Artificial Sequence: Synthetic oligonucleotide
gcaggcugucugucucucucucucg

SEQ ID NO: 1162 - RNA, 25 nt, Artificial Sequence
  Description of Artificial Sequence: Synthetic oligonucleotide
ggcaggcugucugucucucucucuc

SEQ ID NO: 1163 - RNA, 25 nt, Artificial Sequence
  Description of Artificial Sequence: Synthetic oligonucleotide
aggcaggcugucugucucucucucu

SEQ ID NO: 1164 - RNA, 25 nt, Artificial Sequence
  Description of Artificial Sequence: Synthetic oligonucleotide
uaggcaggcugucugucucucucuc

SEQ ID NO: 1165 - RNA, 25 nt, Artificial Sequence
  Description of Artificial Sequence: Synthetic oligonucleotide
uuaggcaggcugucugucucucucu

SEQ ID NO: 1166 - RNA, 25 nt, Artificial Sequence
  Description of Artificial Sequence: Synthetic oligonucleotide
cuuaggcaggcugucugucucucuc

SEQ ID NO: 1167 - RNA, 25 nt, Artificial Sequence
  Description of Artificial Sequence: Synthetic oligonucleotide
ucuuaggcaggcugucugucucucu

SEQ ID NO: 1168 - RNA, 25 nt, Artificial Sequence
  Description of Artificial Sequence: Synthetic oligonucleotide
uucuuaggcaggcugucugucucuc

SEQ ID NO: 1169 - RNA, 25 nt, Artificial Sequence
  Description of Artificial Sequence: Synthetic oligonucleotide
cuucuuaggcaggcugucugucucu

SEQ ID NO: 1170 - RNA, 25 nt, Artificial Sequence
  Description of Artificial Sequence: Synthetic oligonucleotide
ucuucuuaggcaggcugucugucuc

SEQ ID NO: 1171 - RNA, 25 nt, Artificial Sequence
  Description of Artificial Sequence: Synthetic oligonucleotide
uucuucuuaggcaggcugucugucu

SEQ ID NO: 1172 - RNA, 25 nt, Artificial Sequence
  Description of Artificial Sequence: Synthetic oligonucleotide
uuucuucuuaggcaggcugucuguc

SEQ ID NO: 1173 - RNA, 25 nt, Artificial Sequence
  Description of Artificial Sequence: Synthetic oligonucleotide
auuucuucuuaggcaggcugucugu

SEQ ID NO: 1174 - RNA, 25 nt, Artificial Sequence
  Description of Artificial Sequence: Synthetic oligonucleotide
cauuucuucuuaggcaggcugucug

SEQ ID NO: 1175 - RNA, 25 nt, Artificial Sequence
  Description of Artificial Sequence: Synthetic oligonucleotide
ucauuucuucuuaggcaggcugucu

SEQ ID NO: 1176 - RNA, 25 nt, Artificial Sequence
  Description of Artificial Sequence: Synthetic oligonucleotide
uucauuucuucuuaggcaggcuguc

SEQ ID NO: 1177 - RNA, 25 nt, Artificial Sequence
  Description of Artificial Sequence: Synthetic oligonucleotide
auucauuucuucuuaggcaggcugu

SEQ ID NO: 1178 - RNA, 25 nt, Artificial Sequence
  Description of Artificial Sequence: Synthetic oligonucleotide
cauucauuucuucuuaggcaggcug

SEQ ID NO: 1179 - RNA, 25 nt, Artificial Sequence
  Description of Artificial Sequence: Synthetic oligonucleotide
acauucauuucuucuuaggcaggcu

SEQ ID NO: 1180 - RNA, 25 nt, Artificial Sequence
  Description of Artificial Sequence: Synthetic oligonucleotide
cacauucauuucuucuuaggcaggc

SEQ ID NO: 1181 - RNA, 25 nt, Artificial Sequence
  Description of Artificial Sequence: Synthetic oligonucleotide
ucacauucauuucuucuuaggcagg

SEQ ID NO: 1182 - RNA, 25 nt, Artificial Sequence
  Description of Artificial Sequence: Synthetic oligonucleotide
uucacauucauuucuucuuaggcag

SEQ ID NO: 1183 - RNA, 25 nt, Artificial Sequence
  Description of Artificial Sequence: Synthetic oligonucleotide
auucacauucauuucuucuuaggca

SEQ ID NO: 1184 - RNA, 25 nt, Artificial Sequence
  Description of Artificial Sequence: Synthetic oligonucleotide
cauucacauucauuucuucuuaggc

SEQ ID NO: 1185 - RNA, 25 nt, Artificial Sequence
  Description of Artificial Sequence: Synthetic oligonucleotide
gcauucacauucauuucuucuuagg

SEQ ID NO: 1186 - RNA, 25 nt, Artificial Sequence
  Description of Artificial Sequence: Synthetic oligonucleotide
cgcauucacauucauuucuucuuag

SEQ ID NO: 1187 - RNA, 25 nt, Artificial Sequence
  Description of Artificial Sequence: Synthetic oligonucleotide
ccgcauucacauucauuucuucuua

SEQ ID NO: 1188 - RNA, 25 nt, Artificial Sequence
  Description of Artificial Sequence: Synthetic oligonucleotide
gccgcauucacauucauuucuucuu

SEQ ID NO: 1189 - RNA, 25 nt, Artificial Sequence
  Description of Artificial Sequence: Synthetic oligonucleotide
agccgcauucacauucauuucuucu

SEQ ID NO: 1190 - RNA, 25 nt, Artificial Sequence
  Description of Artificial Sequence: Synthetic oligonucleotide
aagccgcauucacauucauuucuuc

SEQ ID NO: 1191 - RNA, 25 nt, Artificial Sequence
  Description of Artificial Sequence: Synthetic oligonucleotide
caagccgcauucacauucauuucuu

SEQ ID NO: 1192 - RNA, 25 nt, Artificial Sequence
  Description of Artificial Sequence: Synthetic oligonucleotide
acaagccgcauucacauucauuucu

SEQ ID NO: 1193 - RNA, 25 nt, Artificial Sequence
  Description of Artificial Sequence: Synthetic oligonucleotide
cacaagccgcauucacauucauuuc

SEQ ID NO: 1194 - RNA, 25 nt, Artificial Sequence
  Description of Artificial Sequence: Synthetic oligonucleotide
ccacaagccgcauucacauucauuu

SEQ ID NO: 1195 - RNA, 25 nt, Artificial Sequence
  Description of Artificial Sequence: Synthetic oligonucleotide
gccacaagccgcauucacauucauu

SEQ ID NO: 1196 - RNA, 25 nt, Artificial Sequence
  Description of Artificial Sequence: Synthetic oligonucleotide
ugccacaagccgcauucacauucau

SEQ ID NO: 1197 - RNA, 25 nt, Artificial Sequence
  Description of Artificial Sequence: Synthetic oligonucleotide
gugccacaagccgcauucacauuca

SEQ ID NO: 1198 - RNA, 25 nt, Artificial Sequence
  Description of Artificial Sequence: Synthetic oligonucleotide
ugugccacaagccgcauucacauuc

SEQ ID NO: 1199 - RNA, 25 nt, Artificial Sequence
  Description of Artificial Sequence: Synthetic oligonucleotide
cugugccacaagccgcauucacauu

SEQ ID NO: 1200 - RNA, 25 nt, Artificial Sequence
  Description of Artificial Sequence: Synthetic oligonucleotide
acugugccacaagccgcauucacau

SEQ ID NO: 1201 - RNA, 25 nt, Artificial Sequence
  Description of Artificial Sequence: Synthetic oligonucleotide
aacugugccacaagccgcauucaca

SEQ ID NO: 1202 - RNA, 25 nt, Artificial Sequence
  Description of Artificial Sequence: Synthetic oligonucleotide
caacugugccacaagccgcauucac

SEQ ID NO: 1203 - RNA, 25 nt, Artificial Sequence
  Description of Artificial Sequence: Synthetic oligonucleotide
ucaacugugccacaagccgcauuca

SEQ ID NO: 1204 - RNA, 25 nt, Artificial Sequence
  Description of Artificial Sequence: Synthetic oligonucleotide
gucaacugugccacaagccgcauuc

SEQ ID NO: 1205 - RNA, 25 nt, Artificial Sequence
  Description of Artificial Sequence: Synthetic oligonucleotide
ugucaacugugccacaagccgcauu

SEQ ID NO: 1206 - RNA, 25 nt, Artificial Sequence
  Description of Artificial Sequence: Synthetic oligonucleotide
uugucaacugugccacaagccgcau

SEQ ID NO: 1207 - RNA, 25 nt, Artificial Sequence
  Description of Artificial Sequence: Synthetic oligonucleotide
cuugucaacugugccacaagccgca

SEQ ID NO: 1208 - RNA, 25 nt, Artificial Sequence
  Description of Artificial Sequence: Synthetic oligonucleotide
ccuugucaacugugccacaagccgc

SEQ ID NO: 1209 - RNA, 25 nt, Artificial Sequence
  Description of Artificial Sequence: Synthetic oligonucleotide
uccuugucaacugugccacaagccg

SEQ ID NO: 1210 - RNA, 25 nt, Artificial Sequence
  Description of Artificial Sequence: Synthetic oligonucleotide
auccuugucaacugugccacaagcc

SEQ ID NO: 1211 - RNA, 25 nt, Artificial Sequence
  Description of Artificial Sequence: Synthetic oligonucleotide
cauccuugucaacugugccacaagc

SEQ ID NO: 1212 - RNA, 25 nt, Artificial Sequence
  Description of Artificial Sequence: Synthetic oligonucleotide
ucauccuugucaacugugccacaag

SEQ ID NO: 1213 - RNA, 25 nt, Artificial Sequence
  Description of Artificial Sequence: Synthetic oligonucleotide
aucauccuugucaacugugccacaa

SEQ ID NO: 1214 - RNA, 25 nt, Artificial Sequence
  Description of Artificial Sequence: Synthetic oligonucleotide
uaucauccuugucaacugugccaca

SEQ ID NO: 1215 - RNA, 25 nt, Artificial Sequence
  Description of Artificial Sequence: Synthetic oligonucleotide
uuaucauccuugucaacugugccac

SEQ ID NO: 1216 - RNA, 25 nt, Artificial Sequence
  Description of Artificial Sequence: Synthetic oligonucleotide
uuuaucauccuugucaacugugcca

SEQ ID NO: 1217 - RNA, 25 nt, Artificial Sequence
  Description of Artificial Sequence: Synthetic oligonucleotide
auuuaucauccuugucaacugugcc

SEQ ID NO: 1218 - RNA, 25 nt, Artificial Sequence
  Description of Artificial Sequence: Synthetic oligonucleotide
gauuuaucauccuugucaacugugc

SEQ ID NO: 1219 - RNA, 25 nt, Artificial Sequence
  Description of Artificial Sequence: Synthetic oligonucleotide
ugauuuaucauccuugucaacugug

SEQ ID NO: 1220 - RNA, 25 nt, Artificial Sequence
  Description of Artificial Sequence: Synthetic oligonucleotide
uugauuuaucauccuugucaacugu

SEQ ID NO: 1221 - RNA, 25 nt, Artificial Sequence
  Description of Artificial Sequence: Synthetic oligonucleotide
auugauuuaucauccuugucaacug

SEQ ID NO: 1222 - RNA, 25 nt, Artificial Sequence
  Description of Artificial Sequence: Synthetic oligonucleotide
uauugauuuaucauccuugucaacu

SEQ ID NO: 1223 - RNA, 25 nt, Artificial Sequence
  Description of Artificial Sequence: Synthetic oligonucleotide
uuauugauuuaucauccuugucaac

SEQ ID NO: 1224 - RNA, 25 nt, Artificial Sequence
  Description of Artificial Sequence: Synthetic oligonucleotide
auuauugauuuaucauccuugucaa

SEQ ID NO: 1225 - RNA, 25 nt, Artificial Sequence
  Description of Artificial Sequence: Synthetic oligonucleotide
cauuauugauuuaucauccuuguca

SEQ ID NO: 1226 - RNA, 25 nt, Artificial Sequence
  Description of Artificial Sequence: Synthetic oligonucleotide
gcauuauugauuuaucauccuuguc

SEQ ID NO: 1227 - RNA, 25 nt, Artificial Sequence
  Description of Artificial Sequence: Synthetic oligonucleotide
ugcauuauugauuuaucauccuugu

SEQ ID NO: 1228 - RNA, 25 nt, Artificial Sequence
  Description of Artificial Sequence: Synthetic oligonucleotide
uugcauuauugauuuaucauccuug

SEQ ID NO: 1229 - RNA, 25 nt, Artificial Sequence
  Description of Artificial Sequence: Synthetic oligonucleotide
cuugcauuauugauuuaucauccuu

SEQ ID NO: 1230 - RNA, 25 nt, Artificial Sequence
  Description of Artificial Sequence: Synthetic oligonucleotide
gcuugcauuauugauuuaucauccu

SEQ ID NO: 1231 - RNA, 25 nt, Artificial Sequence
  Description of Artificial Sequence: Synthetic oligonucleotide
agcuugcauuauugauuuaucaucc

SEQ ID NO: 1232 - RNA, 25 nt, Artificial Sequence
  Description of Artificial Sequence: Synthetic oligonucleotide
aagcuugcauuauugauuuaucauc

SEQ ID NO: 1233 - RNA, 25 nt, Artificial Sequence
  Description of Artificial Sequence: Synthetic oligonucleotide
uaagcuugcauuauugauuuaucau

SEQ ID NO: 1234 - RNA, 25 nt, Artificial Sequence
  Description of Artificial Sequence: Synthetic oligonucleotide
guaagcuugcauuauugauuuauca

SEQ ID NO: 1235 - RNA, 25 nt, Artificial Sequence
  Description of Artificial Sequence: Synthetic oligonucleotide
aguaagcuugcauuauugauuuauc

SEQ ID NO: 1236 - RNA, 25 nt, Artificial Sequence
  Description of Artificial Sequence: Synthetic oligonucleotide
uaguaagcuugcauuauugauuuau

SEQ ID NO: 1237 - RNA, 25 nt, Artificial Sequence
  Description of Artificial Sequence: Synthetic oligonucleotide
auaguaagcuugcauuauugauuua

SEQ ID NO: 1238 - RNA, 25 nt, Artificial Sequence
  Description of Artificial Sequence: Synthetic oligonucleotide
gauaguaagcuugcauuauugauuu

SEQ ID NO: 1239 - RNA, 25 nt, Artificial Sequence
  Description of Artificial Sequence: Synthetic oligonucleotide
ugauaguaagcuugcauuauugauu

SEQ ID NO: 1240 - RNA, 25 nt, Artificial Sequence
  Description of Artificial Sequence: Synthetic oligonucleotide
augauaguaagcuugcauuauugau

SEQ ID NO: 1241 - RNA, 25 nt, Artificial Sequence
  Description of Artificial Sequence: Synthetic oligonucleotide
aaugauaguaagcuugcauuauuga

SEQ ID NO: 1242 - RNA, 25 nt, Artificial Sequence
  Description of Artificial Sequence: Synthetic oligonucleotide
aaaugauaguaagcuugcauuauug

SEQ ID NO: 1243 - RNA, 25 nt, Artificial Sequence
  Description of Artificial Sequence: Synthetic oligonucleotide
uaaaugauaguaagcuugcauuauu

SEQ ID NO: 1244 - RNA, 25 nt, Artificial Sequence
  Description of Artificial Sequence: Synthetic oligonucleotide
auaaaugauaguaagcuugcauuau

SEQ ID NO: 1245 - RNA, 25 nt, Artificial Sequence
  Description of Artificial Sequence: Synthetic oligonucleotide
cauaaaugauaguaagcuugcauua

SEQ ID NO: 1246 - RNA, 25 nt, Artificial Sequence
  Description of Artificial Sequence: Synthetic oligonucleotide
ucauaaaugauaguaagcuugcauu

SEQ ID NO: 1247 - RNA, 25 nt, Artificial Sequence
  Description of Artificial Sequence: Synthetic oligonucleotide
uucauaaaugauaguaagcuugcau

SEQ ID NO: 1248 - RNA, 25 nt, Artificial Sequence
  Description of Artificial Sequence: Synthetic oligonucleotide
auucauaaaugauaguaagcuugca

SEQ ID NO: 1249 - RNA, 25 nt, Artificial Sequence
  Description of Artificial Sequence: Synthetic oligonucleotide
uauucauaaaugauaguaagcuugc

SEQ ID NO: 1250 - RNA, 25 nt, Artificial Sequence
  Description of Artificial Sequence: Synthetic oligonucleotide
cuauucauaaaugauaguaagcuug

SEQ ID NO: 1251 - RNA, 25 nt, Artificial Sequence
  Description of Artificial Sequence: Synthetic oligonucleotide
gcuauucauaaaugauaguaagcuu

SEQ ID NO: 1252 - RNA, 25 nt, Artificial Sequence
  Description of Artificial Sequence: Synthetic oligonucleotide
ugcuauucauaaaugauaguaagcu

SEQ ID NO: 1253 - RNA, 25 nt, Artificial Sequence
  Description of Artificial Sequence: Synthetic oligonucleotide
uugcuauucauaaaugauaguaagc

SEQ ID NO: 1254 - RNA, 25 nt, Artificial Sequence
  Description of Artificial Sequence: Synthetic oligonucleotide
auugcuauucauaaaugauaguaag

SEQ ID NO: 1255 - RNA, 25 nt, Artificial Sequence
  Description of Artificial Sequence: Synthetic oligonucleotide
uauugcuauucauaaaugauaguaa

SEQ ID NO: 1256 - RNA, 25 nt, Artificial Sequence
  Description of Artificial Sequence: Synthetic oligonucleotide
guauugcuauucauaaaugauagua

SEQ ID NO: 1257 - RNA, 25 nt, Artificial Sequence
  Description of Artificial Sequence: Synthetic oligonucleotide
aguauugcuauucauaaaugauagu

SEQ ID NO: 1258 - RNA, 25 nt, Artificial Sequence
  Description of Artificial Sequence: Synthetic oligonucleotide
caguauugcuauucauaaaugauag

SEQ ID NO: 1259 - RNA, 25 nt, Artificial Sequence
  Description of Artificial Sequence: Synthetic oligonucleotide
ucaguauugcuauucauaaaugaua

SEQ ID NO: 1260 - RNA, 25 nt, Artificial Sequence
  Description of Artificial Sequence: Synthetic oligonucleotide
uucaguauugcuauucauaaaugau

SEQ ID NO: 1261 - RNA, 25 nt, Artificial Sequence
  Description of Artificial Sequence: Synthetic oligonucleotide
cuucaguauugcuauucauaaauga

SEQ ID NO: 1262 - RNA, 25 nt, Artificial Sequence
  Description of Artificial Sequence: Synthetic oligonucleotide
ucuucaguauugcuauucauaaaug

SEQ ID NO: 1263 - RNA, 25 nt, Artificial Sequence
  Description of Artificial Sequence: Synthetic oligonucleotide
uucuucaguauugcuauucauaaau

SEQ ID NO: 1264 - RNA, 25 nt, Artificial Sequence
  Description of Artificial Sequence: Synthetic oligonucleotide
uuucuucaguauugcuauucauaaa

SEQ ID NO: 1265 - RNA, 25 nt, Artificial Sequence
  Description of Artificial Sequence: Synthetic oligonucleotide
auuucuucaguauugcuauucauaa

SEQ ID NO: 1266 - RNA, 25 nt, Artificial Sequence
  Description of Artificial Sequence: Synthetic oligonucleotide
aauuucuucaguauugcuauucaua

SEQ ID NO: 1267 - RNA, 25 nt, Artificial Sequence
  Description of Artificial Sequence: Synthetic oligonucleotide
uaauuucuucaguauugcuauucau

SEQ ID NO: 1268 - RNA, 25 nt, Artificial Sequence
  Description of Artificial Sequence: Synthetic oligonucleotide
uuaauuucuucaguauugcuauuca

SEQ ID NO: 1269 - RNA, 25 nt, Artificial Sequence
  Description of Artificial Sequence: Synthetic oligonucleotide
uuuaauuucuucaguauugcuauuc

SEQ ID NO: 1270 - RNA, 25 nt, Artificial Sequence
  Description of Artificial Sequence: Synthetic oligonucleotide
uuuuaauuucuucaguauugcuauu

SEQ ID NO: 1271 - RNA, 25 nt, Artificial Sequence
  Description of Artificial Sequence: Synthetic oligonucleotide
guuuuaauuucuucaguauugcuau

SEQ ID NO: 1272 - RNA, 25 nt, Artificial Sequence
  Description of Artificial Sequence: Synthetic oligonucleotide
uguuuuaauuucuucaguauugcua

SEQ ID NO: 1273 - RNA, 25 nt, Artificial Sequence
  Description of Artificial Sequence: Synthetic oligonucleotide
uuguuuuaauuucuucaguauugcu

SEQ ID NO: 1274 - RNA, 25 nt, Artificial Sequence
  Description of Artificial Sequence: Synthetic oligonucleotide
uuuguuuuaauuucuucaguauugc

SEQ ID NO: 1275 - RNA, 25 nt, Artificial Sequence
  Description of Artificial Sequence: Synthetic oligonucleotide
uuuuguuuuaauuucuucaguauug

SEQ ID NO: 1276 - RNA, 25 nt, Artificial Sequence
  Description of Artificial Sequence: Synthetic oligonucleotide
cuuuuguuuuaauuucuucaguauu

SEQ ID NO: 1277 - RNA, 25 nt, Artificial Sequence
  Description of Artificial Sequence: Synthetic oligonucleotide
ucuuuuguuuuaauuucuucaguau

SEQ ID NO: 1278 - RNA, 25 nt, Artificial Sequence
  Description of Artificial Sequence: Synthetic oligonucleotide
aucuuuuguuuuaauuucuucagua

SEQ ID NO: 1279 - RNA, 25 nt, Artificial Sequence
  Description of Artificial Sequence: Synthetic oligonucleotide
aaucuuuuguuuuaauuucuucagu

SEQ ID NO: 1280 - RNA, 25 nt, Artificial Sequence
  Description of Artificial Sequence: Synthetic oligonucleotide
caaucuuuuguuuuaauuucuucag

SEQ ID NO: 1281 - RNA, 25 nt, Artificial Sequence
  Description of Artificial Sequence: Synthetic oligonucleotide
gcaaucuuuuguuuuaauuucuuca

SEQ ID NO: 1282 - RNA, 25 nt, Artificial Sequence
  Description of Artificial Sequence: Synthetic oligonucleotide
agcaaucuuuuguuuuaauuucuuc

SEQ ID NO: 1283 - RNA, 25 nt, Artificial Sequence
  Description of Artificial Sequence: Synthetic oligonucleotide
cagcaaucuuuuguuuuaauuucuu

SEQ ID NO: 1284 - RNA, 25 nt, Artificial Sequence
  Description of Artificial Sequence: Synthetic oligonucleotide
acagcaaucuuuuguuuuaauuucu

SEQ ID NO: 1285 - RNA, 25 nt, Artificial Sequence
  Description of Artificial Sequence: Synthetic oligonucleotide
gacagcaaucuuuuguuuuaauuuc

SEQ ID NO: 1286 - RNA, 25 nt, Artificial Sequence
  Description of Artificial Sequence: Synthetic oligonucleotide
agacagcaaucuuuuguuuuaauuu

SEQ ID NO: 1287 - RNA, 25 nt, Artificial Sequence
  Description of Artificial Sequence: Synthetic oligonucleotide
gagacagcaaucuuuuguuuuaauu

SEQ ID NO: 1288 - RNA, 25 nt, Artificial Sequence
  Description of Artificial Sequence: Synthetic oligonucleotide
ugagacagcaaucuuuuguuuuaau

SEQ ID NO: 1289 - RNA, 25 nt, Artificial Sequence
  Description of Artificial Sequence: Synthetic oligonucleotide
uugagacagcaaucuuuuguuuuaa

SEQ ID NO: 1290 - RNA, 25 nt, Artificial Sequence
  Description of Artificial Sequence: Synthetic oligonucleotide
auugagacagcaaucuuuuguuuua

SEQ ID NO: 1291 - RNA, 25 nt, Artificial Sequence
  Description of Artificial Sequence: Synthetic oligonucleotide
uauugagacagcaaucuuuuguuuu

SEQ ID NO: 1292 - RNA, 25 nt, Artificial Sequence
  Description of Artificial Sequence: Synthetic oligonucleotide
auauugagacagcaaucuuuuguuu

SEQ ID NO: 1293 - RNA, 25 nt, Artificial Sequence
  Description of Artificial Sequence: Synthetic oligonucleotide
uauauugagacagcaaucuuuuguu

SEQ ID NO: 1294 - RNA, 25 nt, Artificial Sequence
  Description of Artificial Sequence: Synthetic oligonucleotide
auauauugagacagcaaucuuuugu

SEQ ID NO: 1295 - RNA, 25 nt, Artificial Sequence
  Description of Artificial Sequence: Synthetic oligonucleotide
gauauauugagacagcaaucuuuug

SEQ ID NO: 1296 - RNA, 25 nt, Artificial Sequence
  Description of Artificial Sequence: Synthetic oligonucleotide
agauauauugagacagcaaucuuuu

SEQ ID NO: 1297 - RNA, 25 nt, Artificial Sequence
  Description of Artificial Sequence: Synthetic oligonucleotide
aagauauauugagacagcaaucuuu

SEQ ID NO: 1298 - RNA, 25 nt, Artificial Sequence
  Description of Artificial Sequence: Synthetic oligonucleotide
uaagauauauugagacagcaaucuu

SEQ ID NO: 1299 - RNA, 25 nt, Artificial Sequence
  Description of Artificial Sequence: Synthetic oligonucleotide
auaagauauauugagacagcaaucu

SEQ ID NO: 1300 - RNA, 25 nt, Artificial Sequence
  Description of Artificial Sequence: Synthetic oligonucleotide
uauaagauauauugagacagcaauc

SEQ ID NO: 1301 - RNA, 25 nt, Artificial Sequence
  Description of Artificial Sequence: Synthetic oligonucleotide
auauaagauauauugagacagcaau

SEQ ID NO: 1302 - RNA, 25 nt, Artificial Sequence
  Description of Artificial Sequence: Synthetic oligonucleotide
aauauaagauauauugagacagcaa

SEQ ID NO: 1303 - RNA, 25 nt, Artificial Sequence
  Description of Artificial Sequence: Synthetic oligonucleotide
aaauauaagauauauugagacagca

SEQ ID NO: 1304 - RNA, 25 nt, Artificial Sequence
  Description of Artificial Sequence: Synthetic oligonucleotide
uaaauauaagauauauugagacagc

SEQ ID NO: 1305 - RNA, 25 nt, Artificial Sequence
  Description of Artificial Sequence: Synthetic oligonucleotide
auaaauauaagauauauugagacag

SEQ ID NO: 1306 - RNA, 25 nt, Artificial Sequence
  Description of Artificial Sequence: Synthetic oligonucleotide
aauaaauauaagauauauugagaca

SEQ ID NO: 1307 - RNA, 25 nt, Artificial Sequence
  Description of Artificial Sequence: Synthetic oligonucleotide
uaauaaauauaagauauauugagac

SEQ ID NO: 1308 - RNA, 25 nt, Artificial Sequence
  Description of Artificial Sequence: Synthetic oligonucleotide
auaauaaauauaagauauauugaga

SEQ ID NO: 1309 - RNA, 25 nt, Artificial Sequence
  Description of Artificial Sequence: Synthetic oligonucleotide
aauaauaaauauaagauauauugag

SEQ ID NO: 1310 - RNA, 25 nt, Artificial Sequence
  Description of Artificial Sequence: Synthetic oligonucleotide
aaauaauaaauauaagauauauuga

SEQ ID NO: 1311 - RNA, 25 nt, Artificial Sequence
  Description of Artificial Sequence: Synthetic oligonucleotide
uaaauaauaaauauaagauauauug

SEQ ID NO: 1312 - RNA, 25 nt, Artificial Sequence
  Description of Artificial Sequence: Synthetic oligonucleotide
guaaauaauaaauauaagauauauu

SEQ ID NO: 1313 - RNA, 25 nt, Artificial Sequence
  Description of Artificial Sequence: Synthetic oligonucleotide
gguaaauaauaaauauaagauauau

SEQ ID NO: 1314 - RNA, 25 nt, Artificial Sequence
  Description of Artificial Sequence: Synthetic oligonucleotide
ugguaaauaauaaauauaagauaua

SEQ ID NO: 1315 - RNA, 25 nt, Artificial Sequence
  Description of Artificial Sequence: Synthetic oligonucleotide
uugguaaauaauaaauauaagauau

SEQ ID NO: 1316 - RNA, 25 nt, Artificial Sequence
  Description of Artificial Sequence: Synthetic oligonucleotide
uuugguaaauaauaaauauaagaua

SEQ ID NO: 1317 - RNA, 25 nt, Artificial Sequence
  Description of Artificial Sequence: Synthetic oligonucleotide
auuugguaaauaauaaauauaagau

SEQ ID NO: 1318 - RNA, 25 nt, Artificial Sequence
  Description of Artificial Sequence: Synthetic oligonucleotide
aauuugguaaauaauaaauauaaga

SEQ ID NO: 1319 - RNA, 25 nt, Artificial Sequence
  Description of Artificial Sequence: Synthetic oligonucleotide
uaauuugguaaauaauaaauauaag

SEQ ID NO: 1320 - RNA, 25 nt, Artificial Sequence
  Description of Artificial Sequence: Synthetic oligonucleotide
auaauuugguaaauaauaaauauaa

SEQ ID NO: 1321 - RNA, 25 nt, Artificial Sequence
  Description of Artificial Sequence: Synthetic oligonucleotide
aauaauuugguaaauaauaaauaua

SEQ ID NO: 1322 - RNA, 25 nt, Artificial Sequence
  Description of Artificial Sequence: Synthetic oligonucleotide
gaauaauuugguaaauaauaaauau

SEQ ID NO: 1323 - RNA, 25 nt, Artificial Sequence
  Description of Artificial Sequence: Synthetic oligonucleotide
agaauaauuugguaaauaauaaaua

SEQ ID NO: 1324 - RNA, 25 nt, Artificial Sequence
  Description of Artificial Sequence: Synthetic oligonucleotide
uagaauaauuugguaaauaauaaau

SEQ ID NO: 1325 - RNA, 25 nt, Artificial Sequence
  Description of Artificial Sequence: Synthetic oligonucleotide
uuagaauaauuugguaaauaauaaa

SEQ ID NO: 1326 - RNA, 25 nt, Artificial Sequence
  Description of Artificial Sequence: Synthetic oligonucleotide
cuuagaauaauuugguaaauaauaa

SEQ ID NO: 1327 - RNA, 25 nt, Artificial Sequence
  Description of Artificial Sequence: Synthetic oligonucleotide
ucuuagaauaauuugguaaauaaua

SEQ ID NO: 1328 - RNA, 25 nt, Artificial Sequence
  Description of Artificial Sequence: Synthetic oligonucleotide
cucuuagaauaauuugguaaauaau

SEQ ID NO: 1329 - RNA, 25 nt, Artificial Sequence
  Description of Artificial Sequence: Synthetic oligonucleotide
acucuuagaauaauuugguaaauaa

SEQ ID NO: 1330 - RNA, 25 nt, Artificial Sequence
  Description of Artificial Sequence: Synthetic oligonucleotide
uacucuuagaauaauuugguaaaua

SEQ ID NO: 1331 - RNA, 25 nt, Artificial Sequence
  Description of Artificial Sequence: Synthetic oligonucleotide
auacucuuagaauaauuugguaaau

SEQ ID NO: 1332 - RNA, 25 nt, Artificial Sequence
  Description of Artificial Sequence: Synthetic oligonucleotide
aauacucuuagaauaauuugguaaa

SEQ ID NO: 1333 - RNA, 25 nt, Artificial Sequence
  Description of Artificial Sequence: Synthetic oligonucleotide
aaauacucuuagaauaauuugguaa

SEQ ID NO: 1334 - RNA, 25 nt, Artificial Sequence
  Description of Artificial Sequence: Synthetic oligonucleotide
gaaauacucuuagaauaauuuggua

SEQ ID NO: 1335 - RNA, 25 nt, Artificial Sequence
  Description of Artificial Sequence: Synthetic oligonucleotide
agaaauacucuuagaauaauuuggu

SEQ ID NO: 1336 - RNA, 25 nt, Artificial Sequence
  Description of Artificial Sequence: Synthetic oligonucleotide
aagaaauacucuuagaauaauuugg

SEQ ID NO: 1337 - RNA, 25 nt, Artificial Sequence
  Description of Artificial Sequence: Synthetic oligonucleotide
gaagaaauacucuuagaauaauuug

SEQ ID NO: 1338 - RNA, 25 nt, Artificial Sequence
  Description of Artificial Sequence: Synthetic oligonucleotide
ggaagaaauacucuuagaauaauuu

SEQ ID NO: 1339 - DNA, 470 bp, Homo sapiens
acttgtaatatacaggtatccctcctggtaagctctggtattatgtcttaacatttttaaatctatggtaatctttacaaaatattttacttccgaactcatatacctggggattttattactctgggaattatgtgttctgccccatcactctctcttaattggatttttaaaattatattcatattgcaggactcggcagaagaccttcgagagaaaggtagaaaataagaatttggctctctgtgtgagcatgtgtgcgtgtgtgcgagagagagagacagacagcctgcctaagaagaaatgaatgtgaatgcggcttgtggcacagttgacaaggatgataaatcaataatgcaagcttactatcatttatgaatagcaatactgaagaaattaaaacaaaagattgctgtctcaatatatcttatatttattatttaccaaattattctaagagtatttcttcc

SEQ ID NO: 1340 - DNA, 227 bp, Homo sapiens
gactcggcagaagaccttcgagagaaaggtagaaaataagaatttggctctctgtgtgagcatgtgtgcgtgtgtgcgagagagagagacagacagcctgcctaagaagaaatgaatgtgaatgcggcttgtggcacagttgacaaggatgataaatcaataatgcaagcttactatcatttatgaatagcaatactgaagaaattaaaacaaaagattgctgtctc

SEQ ID NO: 1341 - DNA, 55361 bp, Unknown
  Description of Unknown: STMN2 transcript sequence
agctcctaggaagcttcagggcttaaagctccactctacttggactgtactatcaggcccccaaaatggggggagccgacagggaaggactgatttccatttcaaactgcattctggtactttgtactccagcaccattggccgatcaatatttaatgcttggagattctgactctgcgggagtcatgtcaggggaccttgggagccaatctgcttgagcttctgagtgataattattcatgggctcctgcctcttgctctttctctagcacggtcccactctgcagactcagtgccttattcagtcttctctctcgctctctccgctgctgtagccggaccctttgccttcgccactgctcagcgtctgcacatccctacaatggctaaaacagcaatggtaaggcactgcgcctcgttctccgtcggctctacctggagcccacctctcacctcctctcttgagctctagaagcattcagagatattttataaagaaaaagatgttaatggtaacacaggaccaggaaggacagggcagttctgggggaggtgggagggcagagaagaggtctatggaaatctaaagcgaagaatttcttttaaaaggtagaagcgggtaagttgccctcctatgggtagagaatttattctgtttccatatttaaaattaggactcaatcgtgaggggaggaagctaccttaactgtttgccttaaatgggcttaagggacattttggaaagtgctttataacgaccttttttttttttatttcttctctagtttaagaagaaaataggaaaggggtaaagggaaggtgggagaaaggaaaaagaaaattgcaaagtcaaagcggtcccatcccgctgtttgaaagatgggtggagacggggggaggggatggagagaactgggcacattttacggtattgtctcgtcgaagaaaccgctagtcctggggtgcggtgcagggaggtaagacggcgggggacagggtgggggtaggacctccgctcctttgttttagggcaagggaggggaaggagagaggaagtcgcggagggcgtggagggcgcgggtgggcagctgcaggggcggggaagcgcgcggcagggaggggtggagggacagcggcttcgaaggcgctggggtggggtttctttgtgtgcggaccagcggtcccggggggaggcacctgcagcgctgggcgcacaatgcggacagccccacccagtgcggaaccgcgcagccccgcccccccgcccggtgctgcatcttcattcgaaagggggtcgggtggggagcgcagcgtgacacccaggagcccaaccctgcggggacagcggcgccacgccccgcgctccccgctcccgactccccgccgcggcttccaagagagacctgaccactgaccccgccctccccacgctggcctcattgttctgcttttaagagagatgggaaaagtgggttaacatttttcttttcggaagcaaattacatagagtgtttagacatagacacagataaagggttctttgaagacctttgatcgtttgcgggaaaagcttctagaacctagacatgtgtatgtataataatagagatgacatgaaatcgtatataaagcaaaagaggtcaaagtcttaagttaagccacgcgaaatttccgttttgtgggtcagacagtgccaaatatcggcaatttcataagctcagagagacaagacagtggagacacaggatgaccggaaaagattctggattcagggccttcatccgcaattggtcttgtgccttgagtgcccacggttctggcgctcagtggccccggggtgaaaaggcagggtggggcctggggtcctgtggcagctggaagcacgtgtcccccgggacttggttgcaggatgcggagacagggaaagctgccgaaaggactccatctgcgcggctccgccctgccctaccctccccgcggagccggggagacctcaggctccgagactggcggggaagaggaatatgggaggggcagttgagctgtatgcagtcctggaacctcttttttcagccccgcagtccacaacggcccgagcaccccttgatgtgcgcagacccccggcgtggctctcagccccagcaccgagcccctcccagccaagcgggtggctctgcagaaaagctggctcgagccccgcccggccacacaaaggcgcggccccacccagcccgggcgcgagaccgcagaggtgacccccttcccagggattcagggagggctgtctcttctcgcccacccacggtccgcggagctcggggctttttttcccccagcccaagccccccgcccaccctctgttctctatgattttccagaatggagaccccgcgaggggcttctctaagggagaccctcgctcctccagcggggcgcggctcggccccacccctcccagctgaggcccagagccgcctaccgctggccgggtgggggcgcacgtggcgactgggtgtgtggagcgcagccagccctgcagagccccgcgccgcgccctgcgctcccctccccggagttgggcgctcgcccccgcggtgcagccggggagaccggtttctgcgcagtgtcctgagctacccccgctttccacaattcgcagttcactcgcacgtccagaaaggttctgagaatgggtggtgggggcgatctcgcctcgctttctgcacccctcagaaaggtttccgctgcaggctagtggctgcaaactcatcgtcatcatcagtattattatcatttcaaatcgttgttattatttaatgattcagtagccttgtttgttctcatttgttcaaaagggacgtggattgctcttggttaaggattaacccttgttgcgttcgctttgcttcctcctaattgccctcatccctttcccccacaaaaaggtaaatttgtctccagttgttcattttaagttataaagcaaatatatttttgcttcctgccaggattatgtatgttcatgtggctaagatacatgtgcaagtgcttgctaagagcagggtttgtgtgccaacgattgctggaaaattctctgcaaagaattgtttgtggctgcaatgggtgagaatacacatatataattgagatgatcttcaacataaggttatatctataaatatataaatatagtttatgcacaaaattttaagttttttcccctgaaactgttcttccaactgctgattcttgatacagcctcaatcctacacagatacatggatcgtgaaatggtagccgccatccaaataaaaatcccaccccaaatatgacaaacgcaagcatcctttctggccataatttaactgcatttgcaaatcatgaaaaaaacactacttctgcagtattaaaataatagattttgaaattaattccaatttcaaagataattaattatcagggcgagtgcttttttcctgattcattaaacaattatgtattcagcatgattgtaagaggtgcatataatattccccattatcttttctaatgaagtgggcaccttctgaatggatatataagtaactagaaatgaaaagctgaggatttggtcagaatttcaggataaaactgaaagaaatggcagtagtttatcaattaatctcatgtatttagtttataccaggtgagtaagctgagcctgcaataaacactctctgtcccagtgtaacacgtcgcaggtagctagaatgataggataaattaatagaccttgtggtgtttgtctatgcacgttaaaattctctgagagaaagtatattttaaaatgataattaagattggacatttgtgctattaaaatctacaactttagtcaaaattcacaatggtttttttttacaataatgtgacttacagatttgtagtaaattattctattctaaaagagaaatgagtgtttttattgttacagctattacctcattaatatttttagcaaacttttatttgttgcattgaaagcagttttaattactttgggtttttatttttcaaattactaatggatagatggtggaataagcatttaatcatttggcacaatatgacttccatcaaatagctcattctcagtgattaaaaaatgctacaagaggctacaatttactcagattcaggaaatgtcctttcagagtgccataaggctgattcatataataaaatagttttcttccctataatttaagatcaaatagttacttagttctgtgaatacctagcagtagctatcaaacagaattttaaagttaaatctgtacaactaacaatgaagtggaggatgaatcgatacatattgaatggaagactttgtcattgataaattcaggccatctttaggaaaattccggatttatcaatcaccattattttttacttcaactgagtgtgactgatcacatgctcaggctaccttggtagctcattgctcacaggaggctgaaaaaagctggcctccgagcaggaggaagctcagagcacaaacctaggcctgggcgtggccactgggagctgctgatagcgaaccccagctcacaccagtttcttttttggtcgtgggaagaaaaacacatattatcctgttgtcacaagatctgtgaccttatatgaaaaaatgctagaattttttcattaaaaaagaaaatactgaactagccagtgacccagatgttttcagaacctagactggttctgtccattggaaaacctcggtgtctgcattaacttttcaccacactagagggcaatcatgttctctaaaaaagcagatgattgatgtaaacctagttccaaatattaactgtttaataaaatcttttcttttaccaggaacattcaagtgtttattcaataagctgatgccatgctttaccctagtggatgaacagagcttgtacaattttcaaggagacaggatgaaatgagtggtcataatctgaaagtagatacacgccctggttaattattccctgatggttttacttctcagttttattacattgttattataataccatttatgttacttctgagattttgtagtggataaatagtagaaaaatgtcagtagtaatagcaaagttatttagcagccgaatattttaatgcttaaaaataaaggaataaattaaagaaaatcattgtttacttcttcatcgattgaaatgtgccccctgttcagagcacatctgaatatcagagtctccacctgcagagaacatgcagcttagcgagtaaaacaggcaggtatgtgatactgaggaggtgtaccaaaaactgactgctgttatttttcccatcttctaagtctgtctttcttttccatttaaagatacctttttaaatctaatccaatgtgatttcaatctagttttatcagatttcaacaattattgagcatctccttgtagtggttttctgtttattagaaaatcgatgttaattttaacgaagtaagaagaaatatataagtataaactaattttgggtatcatcaaaagtggattttttaaatatgcattgatagaattattttttgattacattttatgtaattctaatccagctataaaatatttaatagtgtcatattactgtgttcctcaaactttgatgtgcatatgaattacctttgattttcattaaaatgcaaattctgattcaatacatctggcttgaggcagacattctgtcttccgaacaagctcccagatgatgctgattctgaccactaaacacatcagttttagggatattaacttgtaatatacaggtatccctcctggtaagctctggtattatgtcttaacatttttaaatctatggtaatctttacaaaatattttacttccgaactcatatacctggggattttattactctgggaattatgtgttctgccccatcactctctcttaattggatttttaaaattatattcatattgcaggactcggcagaagaccttcgagagaaaggtagaaaataagaatttggctctctgtgtgagcatgtgtgcgtgtgtgcgagagagagagacagacagcctgcctaagaagaaatgaatgtgaatgcggcttgtggcacagttgacaaggatgataaatcaataatgcaagcttactatcatttatgaatagcaatactgaagaaattaaaacaaaagattgctgtctcaatatatcttatatttattatttaccaaattattctaagagtatttcttcctgaataccatgtgagaaaattcttaagaatttattgagtatgactgtatatttgaaaagagtgttttcttctgcttatctaagccaataaaggatcttcattattcaattctaactttctaaggaagtcaacctacagatcagaaagaggatcttcaaggaatagcatcaaagacatagtcaggtctcccatgcagtgactggctgaccatgcagccattaccacctttctggaaatattatgctgcaaaaatgatacaatacacgaaatatctcaaattaaaaaatataacatttcccaaatagggcactaaaaacatgatcccaaataaaactagcttcagggtttgcagaatatactgttactcaacacaaagttggactaagtctcaaagttagccattcagttgttgttaacagttcatttcagggtctctcagaagctgggaaactttccatttttgcaatttcttgtacattgaaggaaaggaagacacacttaagacagcattacaaaagtaattcatgttttaaatgtttaattctggcagtcgggcagggctctctgtataacctcatttggagatgacaaaaatctaaacttgagggcctcgagccaataagtcttcctatttctttactcaaacattttcccgcaatggtgctttctttcaactgtttttctggtgtattcataaattccagattctctatgggaagtaacttttattgattgatttaacccttgtatagcacatataacatgcaaggcattgttctaagaactttccacatattaactgtgttaatcacttaataatcctaagtaggttctattacagatatggaaactgaggcacagaaagttgaagtatcttactcaaggtcacacagttagtcagatccagaatttgggcccaggccatctggcttcggaatccatctttcaccgattgctgctagtctcatatctgttccatgttagaggtgagctcccattgcagaggtcacacctgtgatatcaccattttatttaaacagaccagagatggtcttctcctttctgatcacagactcaccttgaagagaaaatacttccaaattgatgcctagttttaatagcttacctggggcttattcaaataattgccatgatttaggctttgggagaaagagagctatgaggccgtgtgggttgtaacgtatgagacacatggcgttctgcaggctcagcacagcatcgatttctggtgggaacacactctgatgaccagttccagaaataacattgacttaatctcctcagtcccatcatggttagcacatttcaaaatgcctccttaactacttccataggccagagatatttagttttaacattttgttgaataaaataaatttacacattcacatttaatataactattagatgttatttcaagattctcttcatattaccatcaaagcaggcaggcaggcaggagagaactgtaggaaggttttgaatcccttgtgaaacatttttaattatcttttaataaaggaatcaggccctgtcatttgtcaaggagacatttgcagtagtaaagcttgtgtttataatatccatttttattagtcatgattaaagataacatttgtgtacatttgttctcacaaaacacttttatatgagtgtaaaggttaattaatgcatttcagccatcattttgctggtcatgtggaaatatagcttctttaggaattgtacttagagtaggagccacatattatactataaaaccataacaaaaatattttaagtttgttctcacttgttgttgacctccagagtaaaatatttaatactctggaaagttatgggtttcaaaatttattttatggcaagaaatagataattacagttctcatagagcacatttaaaataatttatttttatagggcaaaaatattgcctaggactgaatgatttttttttttttacaaagattgtaaagcaacgcctgcaagagtgcccatttagcagttattcttctggaataattgtattttggatgttggagttcgcacattaaccattagtacaagtacccaatataacaatagatcatcaggataataaatctgtccatcttttagttgtatgtctttatatcaggataaagagaattgagtgaaatttatctaaacctagtcccacaaatacttttacaagagagcatgttaaagtgtaaattaaatttttattagcattctactctgtctttggaagttttttttccttatgaaatgcagccataaagtttaacttccattaacaaagctgctcacagtaaacctattataataatagtttcccagtttgggcttcctagtgaggagcaacctaactcacacgaaacaaccccaacttataatatattgactgttacaaaactgagaccagaaaatcccatcaagatggtactgttatcatttccagactctcgggaagaacattaatcatctcaggcacttttaggatagacttattgcagcctccctgggaactctgcttcagaacataattatttttattaatgcagagttactttttatttccaacaaaaatatctattgttattatttaagtcttacagctttatctgagaaattccaattagcacccttctcataataaatattcaaacacatgaaaaattaccaaagttgttctagtcttttaatgacatattacatgatcctgcactcttgtcactttaaaaattatctttttattatatttctgatgatttttttcttatatagttttttaaaaggagcaggcaagcatagaagactaaaaaatgttcaaaagaaaaattaaatcgcatgatctatctatatgggaccttgtcatttttagaaaacattcacctgcttcatccttttgaatcttcatataatccctctgagatgggcatactatacaagttgtcttatttaaagattggtaaatttaagctcaaataatttattcagtggcaagcctcagaggcagactcggaacacaggtctaatatatattatatatatattataacatataatatatatattacatataataaagttgtgtatattatttacctatcaaaatatttatatgtaatatataaatatgttatatatcatgtatgtgcctatttcatacatatatacacattcatgcaaaataaggtttagcactccctccactgtcctgtaataaaacatgcacagtgagaatagtcatacacgaggcatatttgtcttcagtttaaagtcattgatagtcagtgtcactaactaaagtaaaatagattggagcaccaactttgttctgaagcctgtgccaggtattatgagaacaaaaataaaaatgttcctcacccttggtggatttagtcttttgcagaaaaaaagatcctgtacatgtcagaaagttcaatagtaataatggtaatttataactataaatggaagtcaccatctcacaatttcaccatcttaacaattttgttaaactgccctacaatattacaagatagtacataatgatacactagtaacatcaactaggaagtaccaagatccaccaaaaggctgaaaaatttaaatatttaatgagtccatcaaccaatctggccagagaattctttaattaaaatgcttcccaaattttactgagaatcagcagcgtttgaggagctagcctccacccccagaggttctcactctattaggtctgaagcaggtcccatggatttgcatttctaacaagctcccaggtggtgctgatgaggctgattcagaaccacacttggagtagacctaaaacagcagtgacctgtagggtccccaagcagcaggccaggacagcatgtgagttacgtcctctgtggagctctgcaacaaggcgtcaagaggtcagagtctaagtccccatcagctctgcccttctccaccagtgctgctggtgctgcatggaaggaagagcccagaagggattctgagtttcagtctttactcttgctgacgcaccttggtcaggtcaattttcctgtttgttcctctaattcagcatctgtaaaatagccatgtgaactgccttgtccatatcagagggtctttttcagactcaaggaaaaaaacgtgaaagtgattagtgtctgtcaagtagtatataaatgcaagaagttgagtttttaaattgtcattagatataaatacccatgtgcatgcatttagaatgagtaaagagggaacaaggagcgcaatcaaaaactgcgtcatttgctttttgaaaaatactttctatgtaatgaaaagtgaaataaaatgttaattgagtccctctgacaacagcatcagacgttttgcagttcttgtgattagaacccacctggccagcccttcttcctcctaaagaagagccttcttcttcttaaatgaaggttggctcagaagaagcaattaactcattcaacgttttgttacagtcaatccacatccaacttttccccaactcaatctgctttaagggaaggatggtaagtggtggcccaagatggcaaccatcaagcttagagaatctctagaagcaggggtgtccccagcaagtagacactgaaaatatgagagggctgataagccagagataaaactcagtacttactttgcttctagtccatgtctacccctttcttggcaccaccttgacactaccctctgagtccaccttcctgagatggtacaaactctgcttagacaaagcagcccatgtccaaaggtgttagggctcagtttaaagctgccttcaaaagttaaaacagaagtgtaaagttctgtgcaattaaaaataatcagcttgtcttggaactcaaacgaatgtaaaatcctatgaaaattaaaaagcagtaccacaagttaccccaaaagtccttaggtcagtaactgttcctgttacaggtaagagagagcatggattagaggtgggcgtgggtatccagtggacatggttttgaaccatgctccactactactcactatctgagaattcttaaatttattaatcatttctatattataattttctcagttatgaaatgggaaaacaatacctaaatcacatggttgttaagtaagcaattgattgttaagcatttggtcatcaaaaatattaatccccttccctgattccctagataaatgatgaaaatactaaataaaaataataaaaatttaaagtgaacatctcaattcttatactttgttaatttctacatgtattacaaatctactagaaattacttggaattgaggaaatgattactgcttaataattctttgtggtagagggagagttggtatcatatttatgagacagcagccaatatagtatatctcaaaggaaaaaatccattctacataatgccagaatttaatagttaagcattttatctaggtcacagcacaataagcaagatggataattaaaataaaagtatatttctcttgcatatatttctcatttcatgtttccctatcatattttatatcttaccttacttcaaatacatatataccttcaataaaactgagccttcttgcttacccaggaagtttcatcattcagtagaaataaaagatgactttagaaatattaaaatacaaaaatctacactgaggtcttttgaatgcaggaaaaagaattatatcacacacacacgtacacgcacgcatgcatacacacacacagaacctctcgttctttcttaacatcttatcaatccatcagtttcactcccactccgtatcacctgactgtgcacaatatctcattgccacctcccagtcttctccctgcctggcaccctcctgctctcctgcttccactttaaacacccttccttcagctaggtcttttctttcagggatcctcccgttgctttcttatctggatcaatttagccttcctcttctccacccattagtggataagcacgacaaagacactagagtcaaataatacaaacagaatataccttagatgagtatggtgatgaaaaggatatggatacttagagtttagcactattctctcagccactcaggaaagcaacgcctttacaatcaatagtgtttcaggtaccaatcaataatctgttattgctatttttaaaatctataaggtatcagtaaaatgtaattactagagcaacaaagatatcttgtgaaatcaaattagtattcatccagcaactgagtacaaaggtttaagggaggataactaccaataccaaaacattttaagcattttgttttgcctcctaaatatcaaatcatgtaaatgtgtggtacataaattaggaattatatttatgacatagctgcagacatattaagagaaatatgtgcttatatttacaagtatagtacagttctttttcatattagatactgttgatgataatctgcatataaaaatgctcaatattttttcacatttataagccataaaatacagctaataaaatgtgtttctactttctcataaacatggaatagtgacaaacaaggagctttatatgaaagcaccattacaatttaaactctcacaaggtcataatatattgcactaagcaggagagttcagcttatttaaaaaaaaaaataaactctaatgaggttctggaatgcagagccaaagcataaagatggaaataaaagaattgcatgtcttctgaactgacttggttgatgatttttttaaaaaaggttttgtgtcttctgacttggttgatgattttttaaaaaaacgttttgtggtagaacaaataaggtaaatgaaattcagtatttaggatgaaaagtttttctaatttcaggaacaacattgaagaaatattgaactaagcagctttgaaagaatcagattccatttgttgaaatttttctgagaatgaatttttttaagacagtgtacacagttgcagtgtgtattggttatggattgtggcaagctatattacaacttacccaagaaataaggaggctgggcgtggtggctcacacctgtaatcccagcactttgggtggccgaggcgggcggatcacgaggtcaggagatcgagaccatcctggctaacacggtgaaaccccgtctctactaaaagtacaaaaaattagccgggtgtggtggcgggtgcctgtagtcccagctactcgggaggctgaggcaggagaatggcgtgaatccgggagggggagtttgcagtgagccgagattgtaccactgcactccagcctgggcgacagagcgagactccgtctcaaaaaaaaaaaaaaaaaaaaaaaaagaaagaaagaaagaaggaaaaaagtcacttgaaaagaatactggactttgtgtccagcttgcatagctgaaaagaataaaaacctgtccacttaaactcattgcaaaaagaagatgtcactcctacaaatagcaaagagtcatgaaattattctatccagaaaagtatacatttcatccctttggataaattttagaagtgaactatgaatacatacggtgaggatagccagctaagaagtcaagaaggatttctcaaatttgctgctcagaaagatcatactctccacaaaacaaataatagcaggctttccaagtcaaccttgaatccagctttcctttatctttccttcttgtgaactttcactagtttactatctaacaatgaatttgacgatagccacataccatcttatagcaatatttgttatcatatcccttgttatttatcattcacctgctctgcttgagccagctacaagtcacatgtcccacgcactttttcctgtttgattttttacagcactttgagacatgtctcattattcctacttgacaggaaagaagccatggaaagttgagtgacttgctcctgatcacaaatgctggccaaggaagagtcgagtttcaaatctaatgatctttccactgcactctagattcctcattttgaactatttttttattttttgcactatagacttttttccacattttgaactgttttttattttttgcactatagacttttctcttatacccaactatattgatgacttcttttaggctagaaacttgtttcacttactttccctttcttcagattgctgcaatattggccaacatgtattgggtacttactgagtcaagtactgtgattgtgccaagtatcttataggaggattatcatcctcatttttacaggtgagaaaggaaaggaggtaaagtcacacacagccaacaaaaatggtagcaccaggatttgaaacaaatcagtctgacccaagttgactttgttaaccactgtatgcacagtcttcttagacatagtaagagctctaattgtgtttggtgatttgattattatgacaaagtaagtaagggaagcagggagaattataagaaataaggctccacaacacttggctatagcaaagccccttaaaacttcaaaaggtcacccaaagaataaagatcaggctgggagcagtggctcacgcctgtaatcccagcactttgggaggccgaggtgggtggatcacctgagttcaggagttcgagaccagcctggacaacatggtgaaaccctgtctctactaaaaatacaaaaattagctggatgtggtggttgccgcctgtaatcccagctacttgggaggctgaggcagggagaatcgcttgaacccaggaggtggaggttgcagtgagccgagatcatgccactgcactccagcctgggcaacaagagcaaaaaactctgactcaaaaaaataaataaatcaatcaataaaataaagatcaatttggagaaattaatgcttattaataagcaatgtcttgcacagcacttcagtttctcaatacattacctaactcaatccttacaacaacaccctatccccattttgtggataaataaactcatgttcagaaggttgaataaattatctaaggttaatagttcctgacctagagctcaaatcttcagtttctatcatattcttgcccttaccctggggtagctaacattcactcactagtattggagctaaaataagggagagaacatataaatgaatacaaaggagacattcacctgccttctctttctccttacatagagaaggttgattatctgctattgtgaagtttgccttttgaaggatagaaatgagaagactttcttaaattttgcctctacgccaagaaattagagtggtaccaccagtagttccattttcaaactatcactgtagctaaagctatgtggtaagggccaaggaaaagaagtattcttgcacttcaaaatgcactgaaataccagtcagtagcataatataaaggaatttagtggagagaagagttgacctcaatctggctccaacatctcggctcttaacccctaccctacacttgttcttcatggggaagctaattgggccactggaagattcagcagctaccatttgcagctgagggacagcccctccctgcttagcaaccaatggatatgcatttatggaacacctgctaactgcgacacacactcctatgtatgagggaaaatacaaaaaatgttaaaggagatgccttcccttgccctcaggaaacttaagtatagttgcaaagaaatgattagcagcaaacgaaaccatggagaagtaagggctaaggtctgtgaaacaagcctagaaaataaccttgtccttgaaaaacacaaaaagaaagaaagaaagaaaagaaactccaaggcccttgtgaaggaaaccattaagtttgcttcacttctgtgtttaggaagacacaaacccagtcttaatgaacctcaaggccacaactactggagacatttaggaattgtcaccacattctaatgtatatatcctctgtttggcccttcctattaatattttgtaaaatttttgaagatatgagcaatgtttaaaaccatgaatccccctttttttataagtaatatttaggctgaataaacaagagaaaataggacataaaggggagccaacgtgtgccttcatttataatgtattcccaagttgtgagtttggtttatcagcaatttatcatgccaaattccaagtcatatttatctatgcagatcaaacacttgattctatttttgccttaatttttttattgggtatgtttatgaccaagtcatatggtattttctgtgacagataaaatgcacaggttattccaatctggctcagccagtcatagcaacatgtagtccttctcatgtcttaagaatgagtatcaagaattcaaagggagttccagatggcatccaaaaagcttacagtttatgcatcacttattctaacagtagaaaaagaatatttgaagccaaaaatagaccttgcatgtagcatgtggaagagtagaaattgccctgatagttaaacaatttgaaattcaagacattaatttctttatgaagcatttgtcacatcataggtaatattttatgcctatcatatatatacttattatgaaatacaaagaaattattcattctatctaagactttgtatcctttaccaatatctctccattctcccacctccaccctagcccctggaaaccacccttctactctctgcttctatgagttcttttttagtgagatcatgcagtatttgtctttctgttcctgtcttatttcacttgacataatgtccttcaggcttatccatgttgtcacaaatgacagaatttccttcttaaggctgaatagtattccattgtgtgtatgtagcacattttctttattaattcatttgttgatggatactcatattgattccatatcttgggtcttgtgaataatgatgcagtgaacataggagtgcagatatctttttgacatactgattccactttgatgggatatatacccagtagtgggactgctggatcatctagtagttttatttttttttattttttattttttttattttgagacagagccttgctatgtcgcccaggctggagtacagtggtgccatctaggctcactgcaatctctgcctcctgggttcaagcaattttcctgcctcagcctcctgagtagctgggattacaggcacgcaccaccatgcccggctaatttttgtatgtttagtagagacggggtttcaccatgtctcgaactcctgtcttcaagtgatccgtccacctcagactcccaaagtgctgcgattacaggtgtgagccaccacgcctggcctagtagttctgtttttaattttttgaggagcctccatactgctttccataatggctctaggaatttacattccaccagcagtgcacaaggattgcttttctccacattctggctaaccagtctcctgtctttttgagaacagacatttcaacacgtgtgagataatatctcattgtggttttgatttgcatttccctgatgattagtgatcttgtgccttttttcatataactgctggacattaatatgccttcctttgagaactgtgtatacaggagaaaataatcacttctcagaggagctttcatttcaaaatatccgggaaaaaaatagaaaaaatggaaaatttatcctagagtaagttgtcttttatattttgaccctgtttgtgacataaactggatgatacaaaactggaatgcaaaggctttaggaggattacttacttacttgtatattgctttaggttgtttgcagaaaattatactaattgaagttcaggctatgatgtgataaaatctatgtcaggagatgagtctacatgcaaagtttgaggaagtgacatttgagtttcaaaacaaaaaagcaattttcaatgtcatatctaggttaacccaaaagatttctttcaccctatttagctgcctctaagatggatgctgaggataattacactgtagaacaataggacgatgcttcacactcacctcacaggctctgttattcccacatactgccagagatactccaaaataaaatcactgcaacatcaggcagttataaacctcaacggtattattttctatttatatacagtatattttatattttacaagtataaaatagaatatatttattctattctctttgacacaaagtgaccataagacatattacttaagtatgactagcaaagtcatggggcttgtcattcaggaggaaactcttaactaactgttcagtttttgttcactgcaccatttacataagccaaactaatgcttcacactgtgcaaaacaatgcacagtgttgtgaatgaatggctaaaataaaactctaatgagtggggtttgaaaaatgcaactttagaaaactgttgagaaaatgttgcacactgcgcattttacaaaatttcgttgaaggacactggatattctttttaggattatggagggaagcaaaattttggctcctacatgcagtttttgtggcctttgcctgaaatagtcatctcccattaattatttagatatcattcatttcctaagacaacatttagggagactgccttaagtacaatttgtacactacccagataagaattctttttggtgaaacatcgataaatattacttggcagtaacaccaagttaaaatatttgtttcacagtcgacgttaataactattatagataaagtgaattttataagacatactcagatctaaaacagcaatatggagctcttcaaatccattgaaacttcataccagcctacggaagtagaggtttttatgcaaactcttcaagaaatatgctctgaacttttaattccttagattgatagaggaattaaatcatgatataactaataggtttgtggtacaaattgctgctgcttaatctgactctgtgtcttcccagtgttctatatgaattagatattccattatctaaagacaatcaaccccatcccacggtgatagctctaggactccctttgagttcattaaatctgtattctcagtctccaaacttctggttaattcaaacagaaaagtcaactggcccatgaactaaaataaagtcatctgaattttttttttattttgcagtgtgataaaagtctcgcactttttatttctgaaagtttctgctttcactgagagcataataggctatccacccttatgcaatcttacatacaaagtcatagtcaggctaaattcaaaaacacatgtgagatagaagtcaacgtttattttctggagaaaagccacacattacaacaaagtgaacaatgaagctggcatccttatcactggtgaccaaaacatttgtgactctggacattggccccacaaatgcgataaacattctgcataggaagtgagttttgctaattaaaaatggatccaaaatactttctactcttcagccaagaattaaaaagtaatagggaggaattgaaatcacttgggtgctacattgagccattctggagaagcaattcagagaatgtcatggcagcctcaaattgctgctcaggagcatcccagcttagaagattgcaggaaaggaagagcaaagtcattcttacatgagaactgtccttaaccagatgaatagactctccattttttaccctggctttgtctcatttaagtcccaaccaatctagctatcattttaggttttactacctgctagtatttaggagcttagggggataaaaaaatccctcaatactcagaattagacttggtgataaaaatcttgacacataaacagaataaagcgctttcattactcctctaaaccacagtgtcatttggtctctatcaaggactgtaagaatttctttcatcaggggaaagaaaaaaaggacaagagcctgcaagatgtagcggaactctcattaaacacagcaggagctttaactggaatccagagtaaggtgaggtaccaggttacaacaatttactgcttttattacaattttgatcacaaggactgattcatgtcatctagtttcttttccttgtcactatcactggtgctaagaatacatcaaattgaaatttaagagcctcatatgtttctgtataacccagtgatgggttgtactgctttgaccttcttaaatgtccctttatttcatttgatatccattcccatagaaaaactataatgctttggttggtcaaaatattaatctttcaaaacctccctggcttagaaaaccaaatttttgtagagagagatgggtagaatctaattttattctaaagcaattagcattacatcatcacagcagaaatatctagaatattacctcatgtcagtgatcttctgatatgttaaaaagggtattttaaaatctgagttatttctttttctttttaaagttacatcattaattacatactcatcaaccaaaatattttatgctccaaatttgaaccgatatagtatgtaagaagtgttcaaaatgaaattattttggtctattttgtctttgaagaagatcacagggatggacctcccaaaaggatttttaaatgggattacatatctgacttttaaaaaaaattatctgaccttgagttatagtgccccaaagtaagcaaagttccaaacacacagtatcatcagaattgagttaaaattatcaccaggggcttaatttctgaaattaaaaaggaaatgttatttccttatgaaaagaaaaggaaccaaaaatgaacttcaaggtagctgatttctgtctatgttaagacttaggtaatgggagaaagggaaaaggaaggacagaattaggagaggagcagtgtttaacaattgcgggtgcaagactcaagttttttagaatccattagcagagaaccctatttctcccattaactgctgtccttttaaatcctggcaccagctctgaggactgcagggtccatagctagtgccccactctacccagtttaaagacaccactgcctggaaatgacaggggtttttttcttaaggaaagaggtgctttctgccacgtatatataaattggtaagcttcaaataaagtgcttttgtcctttctgtctatcagaaactgtgcaaatcgaattgctgtaaaaccaagggcaagagacatcaatcctgcattctatagcatctgattttatcctttatccccaggcacatttcaaaaggaaaaaaatgaggttgcatttaaattgagtatttgggacttgccaggaaaacctcccgctagactaatatgattgcagggaaaacaagagaaaggaaaagtggagagggagtgtgctaacagatcctgggcctcgtcagcagagccgtcctgagcacaaggccatggtcagacatctggtcccgcgaatgacgttttctttatggtcattaagaacaccagtgtgtcgggacacaaacaagtattcctttcagggattatgacacattttctcccaaagtagtatattaatgacatttccagagcattctttactatcttttatatgtgatcaggaagactaatacatatcactacttcttttacacacagcattagccaaaactaaagtgtcaaatacaattttgcctaggatgaataaacagaagaaatttttatgatactgcactatcaattccaaattaaataacaacaaaatgataagtgttaaaattcatattaatgattgttcccacacaagccggaaaaaatctttctaagaagtctttcatgagttaatcccatctttcaaagtgttcagtggctccgaattcagttactgtttcctatcagttcttctttcattaagtctcttcccttttttttctctttgcactatttcccttagccgggtacataatctgctgtgctttattcatttgtgtcttaagtttgtttcccgatgacatacctttccagcaacgccatctggggagtttgggcaactgtaccacgttaggaggaaacccttcttcacaggagagtgtgcctttgctgcagggaaggaattaggatttgcttggactgtggttgcagctggcttttaaggatctccttagaatgcaagcaactcatcaatgagaatctctgcaatggttgtcactgggtagagtcatgctatgtggggtcatagcctttgaaacaaataacagtaaagataaaaatgctattaaaggaatcaccacccacagaggttaactgggttttgtccccagaccacctcgaacaagaaagaacatttttatcagtcattttcttagttttagctgataaaacaaagtaccatagactaggtggcttataaacaacagaaatttatttttcacagctttggaaactggaagtctgagatcaggccgccagaatgatcagattctagttagggcctactttgcttttgcagactgccaacttctagctgcattttcatgtggcaaaaggagattgagctagctctctggtctcttcttataaggacactaatcccattcatgaaggcttcaccttcatcatctaattactctccaaagaccccacctccaaatactatcacattgggaattagatttcaaatacaaattttgcggggacacaaatattcagtccataatagtaatgattactcattatacatagggctctaaatgtgctagcttctgatagtttttacactcacttctctttattagcttgtcaagcataattagggcagtggccttactgaaaattattgaatttagtttcctaaggacagatattgaggagttttttcttcactaaaaattcacgttccgatacagctttcatctgttactactttgtgagatggaaaatcttttattttatttttatgtttggattgacccttcttaataaagtcggcatgtaatatgcttcatgtgtttctaatatgtgcttaattttgcaaaatgttttgcataccagaatgcatttctcttccaaaaaaggtaccagcctacaaaaccttgctgttactgttttcaattagttcatggaattaaatgtattaaatgttttatgctctggcagaaattatgattctcacttaactccatataaatctggatctgcctgggcctttataagtgacacaatttcattaactgaataaacaaatgatacaaagaaatttggtttagccttctaaaattccaaaggcgttcaacaaaatatctcagaatggatgttccaggacttttatggcacaggacaacatgtattgcttattttaagaaaataagctaaatagtgaggggattcttttagcagatcctcaggatgtgttaggttgaatcataggcaaatgatatttgatcattgcacctgttaacacattgaacctcatcctaaaattgtagagctagaagaaagccttctggcagtttttaaatagattgatttactgcaatttatccagaagcttcaccgttgtcactggctacatgtgactttggcctctgtggggctatatcctcatttgtaaaattggtggtgaggtaggtggacagttgactaaataatctcttagaataattctagtatctgtggatctaaagcatccaggggttgaatatgtttctttctggccaagaaaagatgcacctgtcaataatgcccaaactcatcttctgagaatcctctttcccaagatacccactctcccttgggttatattatagtaatgatcagaagcccctgccaagaagaaactgttaacctgggaggtctatattttatttcacagccatctgtttatactttctcacaagttagtgcacagtatacccatcattttctaccattttccttaatttattaattttactaattgcataattaacaaaagtaagaagattttacctccttatccccatctggtagtttgcagatacttggcctgatgacaactgacagtgatgagatactcaccaagtttaccagggcaggaggcttcctagagaaaaaatgagaaaatgaaatggggaaggggagtgaaggattgaggaggtgacaatctggactcttgcaactgcatggcaaggttggcacacaagctgggttgcaacggagggaaggagatccttatcagatgtaatcagagctcagatcgagggctttggtgtgtgtagaaagagggagagacaaagaacttaaaacagagctgccatttgaccttgcaatcccattacttggtgtatacccaaaggagaataaatcattctattaaaaagacacatgtgcttgtatgttcatggcagcactattcacaatagctaagacatggaatcaaactaggtgtccatctatggcagattggataaagaaaatggggtaaatataaagcatgcaatacaacatggccataagaaaaaatgaaatcatgtcctttgctgcaacatggatgcagttgggacccataatcctaagtgaattaacacaggaacagaaaaccaaatacagcatgttctcacttataagtgggagctaaacactgagcacacatggacataaatatgagaacaataaacactgtggactactagaggggggaaggagagaggtttgtaaaactacctatcaggtgctatgctcaatacctgggtgatgggatttacaccccaaacatcagcatcatttaatattcccatgtaaaaagactgcacatataccccttgtatctaaaataaaacttgaaattaaaaaaaaaagaaagaaagaaagaggctggaaatagaggctcacacctgtaatcccagcactttgggtggccaaggtgggtggattgcttgagcccgggaattcaagaccagcctgagaaacctggtgaaactctgtctgtacaaaaaatacaaaaattatccaggcatggtggagcgcacctgtagtcccagctaatggggaggctgaggggggaacatcacttgagcccaggaggtggaggttgcagtgagctgggatcacaccactgcactacagcctgggtaacagagcaactctgtctcaaagagagagaggaaagaaaaaagaaaagatggacagataagaaaatgcacttggagattaagagaaagcagcaacataggaccctggataatgtgtttgcttaataactatcctgatgagttatctgactattcccaaatgagtacgtggcaattcaggctgaaccatcagagtagccctccggaatcttacttatgtacaatagacctgcatgcacatttactagaatgagcctctctctctggtaatcatgtctgcttccactaattccatctgtttcctctctctccctcctatcctgctagatcttaattccttcgaccttcctttgtttttctaactccctttctttctcttgttatttaacctgctatactatgcaattgatctcctctgcactaaggaacatgcacttcagaattctgttgacatcttgcattcctttatatttagtgaaagaatgcaaaggagtctacctggcaatattcactctgcaggaggcaataattattattcaaattaaaggaagcagtaaagagaaattcagaaaaaatgaaatatactaatcttcagcttttcatttcagcctacaaggaaaaaatgaaggagctgtccatgctgtcactgatctgctcttgcttttacccggaacctcgcaacatcaacatctatacttacgatggtgagtaacctaggatagacatacccctgctagctagatcatttggaaaggttgacatatatttgtttcttacagctcctgatataattacatcaatattttgtagctctcactattgacttgccgtgtctagctattatgtccaattgattacctattgctgaaaacagtttgaatttggtgctaataacaacacatcaatgtctgttaagaaatgtggatggattcttattaacagccacatccagcatatcaacatccacaatatgtctaaggtctttctttgcaaataatttaataggctaagccataattggagtagatcataatttgtaagaaaatgctttatacttagaaaactcaagagaaagaatcaacaaccataattgtttttgctttattgtagtctttataaagtttctatactttgtatatacatgtcaaccagctaatgataataataattggctcaataaataaaactgacttacgactgaggccctagataaagagggtctgaaaagaaaagcctaaagaattagcatggcaattaacatgattgaggtgcaactctttaggtttgatttatcctgattcattttgcttactttggctctgccacaatccacatgatcttggtcaaatagatacttggattctctaagtctcatttaactctagcatcttcctcttggagttgttgtgaggtttaaacggtttaatgtaagtcaaatatgcaaaaccaagcctagctcattatatcactctacaatgatagctatcattatcaacatcatccttacctaattcagtcaatttaactaaaatattttatacagttctatgtatcctagatatccctaaggcatattttactaactctcaggctcacaaatatttttcttttccatatatgtaaagaaagacattaatgacaaaacaaactgaccttgtggcagttaaccccttctgcacctttaaagcctattcaaggactcaaaggcatttaccttccaaagttattctatcgtagcacaaaaatcataaatgctaattaactgttccataaggaaatgtcctccatgtgaaaggaattctgtctccaaacaaaacattcattagaatgcagggccaatgcctactttgtacaaattcattcggtcagcaaataaattagacagacctttattatttgctagatgtagctgtgaagaaggatccagctatgtttcttatgagactaatgtcgaactatgggttgtcactgaggatccagagttccatagggcgtagtcctcaccttcaaagaattcagggcttagtagaagagtcttacacaaatgactagaatgtagaacacagagtggttaggacaaaggagccagggatggtttttgctgggttagggaatgaaaaaaggggaagaaaatatgtgaagttatgtgtgagctgattcttgaaataagctgtttttatttgcctgcgttctcttataatccttttccataggcttccataatttttattgagctgtatttaaagttgaatagataattcaacatttctcgtaaactgtgcttcctaaaagagtccgtagagaatttcaaatttctgcagtctttaacttgacctggtatttctatgttagataataacgtgacttgtttattgcaggcaaacattataacaataaattattattattgtttacatttgtaagcactaagtatatggcttgtgctttgcattcagcatcctttatcatttaatcttcacaaccaccttagaaggaaggtactctttttatttccatcttttaaatgaggaaataaaagcataaagaagttaattaacttacctagtgtcacacagctattaagaggggcttactatttggatgcaaatataggcagttctaattccagagcctctaatctaaggcatttaaaaccccatcaccttatcaaataagctgtttttatttgcccgtgttctcttataatccttatccataggtttccataatttttataaaattgtatttaaaatttaagtataatcttggatgccatcaggaaaatgaaaaacatttttacatttgtgaaggaaaaagcccacatcatttccaatatagttattgagttagtattatctagactatctattagcagctaaggatctgaggtcaaggcctgccagcctggcattttacttgaccacaacctccatgtgcactaaccaggctgctaaaagaacattaacgggaacataacctgctggcttggttgccacaattttaaaaagacgttaataaattagagagcacttagaggttaggaaataatatggtggtaaagatctagaaacagtgtcattctggggcacttgaagatgtttagcctgggggaacaacttgaaatggaacataactgttttcaaatacttgaaaaatggtggtgcaccacagagaatggcctaatcatgggtagcttcagacttcaaacaaggatcagtgggctaaaaccagagagatggagtttgggactcaaagaatgctcatctgaaattgagggctgaccagcgaggttcttttaaaaatcattgcattttactaaattgtgagttctgtaattataaatgtcctagcaggtgctagctgtcatcttttctattataaattatactattttatgttataatttgtattatacaggcttaaaacataagggtctgataatctgcttatctttaatacataagccactgatagaaaataagtggctaaccattcttcagttctttttttaattgacaaaaattgtatatgtttgcggtgtatggcatattttgaaatatgtatacattagagaatggctaagtgaagcaaattcacatatgcattacctcacacacctgtcatttatttgtgatgagaacaaaaaatctactctttcagtgattttcaagaatacagtacattgttattaacaatagtcagcatggtgtacaataagtcttctgcggccgggcgtggtggctcacgcctataatcccagcactttgggaggccaaggctggcagatcacgaggtcaggagttcgagaccagcctgaccaacatgctgaaaccttgcctctactaaaaatagaaaaattagctgagtgtggtggtaagcgcctgtagtcccagctactcaggaggctgaggcaggagaattgcttgaacctgggaggcggaggttgcagtgagtcgagatagtgccactgcactccagcctggcaaaagagggaaactccgtctcaataataagtctcttgcatttgttcttcctgtttaactgaaattatgtattctttgatcaacatctccccagtctccacccctaacccctggtaaccacaattctactctgcttccgtgagttcaactttatgaatagtccacatgtaagtgagatcatgtggtatttgtctttctgtgcctagcttatttcacttagcatagtgtcctccaggttcacccatgttgtcaaaaatgacaggatttcccccaacttttttaaggctgaacagtattccatgtgtatgtgtataaattagattagtagatgttgccactccctcctccaccacagtggctctatccctggctcctggctccagccgagtacactagaggaggatattctaaacagcaacaacacaggagcaaagacattacaatggggtgttgtcttattgcccccattagactgtaagcatcttgaagacaaggacccccatcacagagtgatgttgtcatccctggagtgggcactgtgcatgattgatgactggaagcaatgaacatacagaagggcaaaacagaaatcagcaggatgctttgcatttcagcattgactttgccaaatatgcccaactgttcagggagttacattggttctaacgaagctcctgtgattcctaagcacaggaatggtgataatatatataatggtgcatgcatatatacgcatatctagataatgatatctcattatatgtgagaactgaagaactccgttatgtttctcgtctaaccaaaaagggcctacagctacgataatttccaaacaaataaatctgtgctacttgattttcatgcaaagctcatatttgttcaaaaggaaaataaagcttaatttaaaatcaatttaggctatttttatctaagtatgcttaccgttattcaactccctgcagatattgtcaaatttctcaatatggtaaatatttattctgttaaaatatatccatagttacactaaagacagagaggtcttatatgttctaaacaacatagagcaaatgctcataaacagcattttattcctatctcccggaataacaacgctacttccaattgctggaatctaaattattaaaataaacccatgctgcaagctttgtatgcttaacattctcaaatgttcacttttcagatatggaagtgaagcaaatcaacaaacgtgcctctggccaggcttttgagctgatcttgaagccaccatctcctatctcagaagccccacgaactttagcttctccaaagaagaaagacctgtccctggaggagatccagaagaaactggaggctgcagaggaaagaagaaaggtaactttttccataggttttccttctctctctccctcccctgctcctccctctcacacactcgggcacacatgcacgcacacacacacacacacacacacacacacacacacacacacacatacagagagcaatgacagctgaacctgtgccatgccaacatgtataggttttcagtagacacagagccaggctagttggggtaaaaactgtaagatagatgctaattttaggctagccaaaccagagctctcagaaatccaaagagcttcagtgctctagtgccccttcccgtatattgaatccccttattataaaagcctcccttccctagaccatcaggcagaagcactgtagagaaaacacagccctggcgaactccagtggtggggaggggaagaagtgctgcttcctccctctcaggatctgtgtcaccccctttgtcaggcgtggttttccttggaattacaaattaccagatcttccctccaagatctttcctgcccagggtaagggccaagagcttgcccctttcctcttcagagtcccactgcctgccctggaagttggtccttccaagatcaggaccttctctgagttctttgaatatgttctttatctttttctaagacttgatggggatttttctctttttgccattggtccctgcttatattaaagagctttccttttgccaaatctttacttttccataatcacatggctaagaagagccaagggtattatttgagaacacttagaaatcctagggactgtgtacacaaacagaagttgtttgaatgtgtctgttccaaccatgtggttatggtagttaatcccatcaaggtactcacgatcatccaaaaatggaattcttttatgtaattcatccccacattgtatttcccaatattttttatgatataattttagaatcaggtaatcactaagaacatgttccctgcacagttttatgatgttttctctaaaaagtcagccaaaactttggacacttctatgttggataattaaaaacagaatgaagataatcctcctcctaaagattgaattctccaagagagaatgcaggacaaacacagatgtgctgtgtatagtatatgtgcatatatacatgcatatatgtacacaaatatgtgtattatcaaataatgaggctcaaacattagaaatccttagattaaattttctaaacaagaaaacactaatctttgtagttgaaaaaaaatcctcctatgatatgtaatatgctgatctcaattttcacctaagagtgatgttctccaaatgtccgatgagcatgtcatatatatatatatgaatttttatatatataattacaatggtaattggtatatagagatatctatattatagatatatatagctatctctatatattacatataccaattatagatataaatataacaatggtaactggtgtatatgtgatgtgtatatatgtatatgtataccataattatatattaatattgtatatatgccataattatatattaatattggtatatatacaccatgattatatattaatattggtgtgtgtatgtgtgtgtgtatatatatatatatatataaaatactagttatcattgttctagatttaaaaaacaggaacctgagctactaactcgactatatatatatatatatatacaggaagttgctttaaaacatttttatcagcttttttattgttatttttagctttattctcatagtaaagctaaaataaattattcaacattatcaaaactttgctgccagcagatgtaagcaatacctaaaacagtggagagcatgttgcacccaaagcagtttaagctctgacccaagcactggcatcttataggcactgggtagagataagagtcataggtcgacatatattgagatgctatgacttgattagaatatggagtcagtgactgaggtgaaattaaaactcaaaccacaattcaacatcctgatttaggatgttgctggtgtttctaggtactacacttaatttgaaagaaattattgaggataaaaaaagaactgggatcaacaaaattaactaggtgttcttataagagtccctgaggttactaattaatgaaactgataaagctcctgcaccctgacagcaagaaattatcaatgattatacatttaaacaattgaattgaactagaaactggccacatggttaaaagacatttacaaatgtaatcatccagtgttatgatgcccagaaaaaaaaaattccttagaatgctttaaaagccgtattccatcacctttccagttatttgttaaacattttgtaatgcaaaaataaccatatagattatgccctagtggtcgggttttatttttagttttttatggtttttttttgttaatggtagagttttaattaaaagaaaatacaactaattagcagaaagtgccaactttaaaaaatcactaattgattttattctattgggttatactgacttaattagcactaatttaaagaactattaattatctttaaagagtctttagcaagtgcatatatctcagtaattatgttagtaaggacatgcctataaccaaaacccaactcaactagttaaaacaaaaagcaaatatgtgactaaaaagtctaggagtggctacagcatcaggaacagctggatccagggatcacagtattatcagaaaactttctttcagtgcctgtcatctcttcctgcatttaactggtttcattatcaagaaagtttaatttcaatagtcagttccaaattatttttctcacaacttagcaactccagcagaaacagagcttctttttcccaatagtttaacaaaagtcccgaaattgagtctcaatggcctggcctggatcacaggcccaacccagaaccaatcattatggccaagaggatgtagtagtttgatatgctagcctgaatcacatgcccaccactgacctgcaaaggattttaggtaagatccctggggtaagaattgtggaggggtagttccccagaagaaaatcgaggtgttctcacaagaggaaggggtaatggatcttaaataaacaaaactatagatgtccacattttctatctataaatgtttagtgttactataacaattagaataattatttagttcatacactattcaatttgtatctcccttctgttgccctgttgccgttattttcttacagatagaatgaaaaatattaatctaggcagctctgtgaaacagtactgtccaaggaatataacgtgagccaggccgggtgtggtggctcatggctataatcccagcactttgggacgccgaggcaggtggatcacctgagatcaggagttcaagaccagcctggccaacatggcaaaaccccatctctactaaaaatacaaaaattcgcagggcatagtggcgagtgcctgtaatcccagctactggggaggctgaggcagaagaattgcttgaacccaggaggtggaggttgcagtgaaccaagatggtaccattgcactccagcctggatgacagagcaagactccatctcaaaaaaaaaaaagaaagaaatgtaatgggagccatatgtgtatttttaaatgttctagaagccacattttttaaaataaaagaaatatgaaatgaattttagtaaaatattcttcacccaatatattcaaaacattatttcaatatgcatgtaatcaatatagaagtattaatgagctgtttcacattattttattcatactaagtgtttgaaatccagtgtgtattttacgtttacaactcatttcaattcatgttagacatattcctagtgcctagtagccaaaggcagccagtagcacagatacggatattaaaacagaaaacacctagtgaataatggggaaattttaggcctaagtttttaaaatccataccagataattattcagattcaaatttactttgttttttcatatatattctttaaaaattacattaatatgggaactcagaaagttcaaaagaaatttccattctatggttttagtctttacattgtcagaactaatgcaagtgtgaagtttaggatgtactgtaagtaataggatcttctaaatctcatgccttcttcagctacctactctgtttctatttcagttcctcactgtggggaggggacttctctgaacctaggtttcatctctcactctcgttcatggtaaacaggttttcctttgtggcacctagcacaattagtaagtaattagtatttactggcatattagtatatatatgcatatgtatttatttaaccctatgtcttctactagattataaactccatgaagatagaacttgtcttttgtttaatagtgcttggcaatagttattactgtaaacattttttttctttcttattcaactcctgttagtcattgcctgagtactacaaatgtttttaagtaaattaataaataataactttcagggccaaatgtgaaagcggcaatatatagcttgttttgattttttattccaccctcccatcctaaaacaattatagtcactaagtttccaaatgacatctgaaattgcactaaggaaatcctagtctgggcaaaatcactcagtcaacagatatttatcaagcacttactatttggcaggccctgttctagacacaggggatactcatcaaacttacattccagtgggggagaaagagctaataaatacatacacagcatattagatgatgcaaaattagcaggacaaagagaactgggggtgtgggggtgaaagaagctaatattatatgttattattactatatataataatataattattggatagtcaaaaaaaaacctcttgaataagacatttgaaaagaagcacaaaggtagcaagggagtagggcgggcagctcttctctgggacctgaacattcaaaatgatgagagcagcaggtgcggaggccctgaaataggaatgtatgaggtgtgtttgagaaataacatggaggccagcgtggctgaagctgagagcagggggagagtggtagcaactgaagtcagaggtcacaattaaggactttgacttcacatgaaatgggagatcatgaaggataataaagccatttcactactttatgtgaatcacagcatctttttaaagaagtatccttttttaaagggggagatgactagaaaaataaatagtgttagataaatagagaaaacaggaaaacattctagactaagacagtgattccagaactaaggatccacagaggcgagaatgcagaaagtgtaggtttcagagcagtgggtagactaagggtttggactagtggatttggatagggagttggagagtagcgaggtgggattagggagggctgtgaatgccaggttagtgtgcaaactccattatataagcagtaaggagtcactacagacttttcaaaaatacatacatgttccacctggcccacgggttagcaacattttcgttgccctggacccatttccttcccaataagttacaggtttgtgaagattctacctagcaaacatattacttttaaataactattaataaattatcttaccatgattataatcaaaggaatctgtaattgctaattatttctgattattaaaagataagcagtattgcactaaattgacataattctaactcaaagtaaatatacagatagacatggctatagatgtgaaatatgatttctgttagggctttttaaatttaaaaaaacttacgagttctcctccctccccctacccttaataccttgaaggcctctttgtgggacttcagggaccccttcagggaactatgacctaggctgtatttggggggctttctgggtttatagctggaaggctgccacagaggcatcgccacttgggctcagattcactttgtgttcaatgttttggcaatgtccccacctccccattccatctgttgacactattgcagcactgaccatctggttactaggttggaggatactccctcgggctcctttgaaccagaattagtgctccagtgattagataatagaagaagcttgtcataaaaagaataagccctttccctgctttttctccattctttgattatcgctggtagtcagtgatgatcatctctatgagtctatatcaatctcatcaggtcagtttgaacctcatctcttgaaatcaaagtttccataatgcaactgacccacaagggtgaaatgacatgaatgctttaaccatccatttatcatttattcattcattcaaccaacatgtatttagcaagaggcagcagagttagcataactatacatcccagttggcccaggacaactccagctaactctcgttgttttgataccattattaattatttctctttactctcataagtgttccactttggacaatcaattacatgagcatccttagcagggcacagtgtttaagggcatctttaaaatattgtctttaagaacatgtggttaagagaatgtctgtgttcaaatcctggttccaccacttaaaagctgtgtgacctcaagcaagtgacttaatctccgtatgtcctcctttgtcaatctgtaaaatgagactagtaatagaacttatggagttagtgtgagaattggaaggttactctacaataaagacatataaccagcatggtaaaagggttagcaattactatgtgaagaagcatccagtttctgacctcacagagattatctagcaaactcatgattttataaagaaaagaagtttctcatcaacagagactgaaatgctaccatacaatatacgttgctttttttttttttttttttttgagacggagtctcgctctgccactcaggctcaggctggagtgcagtgttgccaccttggctaattgcaacctccacctcccaggttcaagcaattctcctgcctcagtctcccaagtagctgggattataggcacccaccaccacacccagctaatttttatatttttagtagagacaaggttttgtcatgttggccagactggtctcaaactcctgacctcaggtgatccacccacctcagccttccgaagtgctggcattacaggcatgagccaccatgcccggccaatatttttaaatattataaaatattctttatcaaattgcatagaagaaaagacagtttgataggtaatagatatataaataggtcaggccaactaaaagtgtcctgaaaaaattaatattgtgaaaacaaaaggattttaatgacattgataaaatctcaccctaaaagagattaaattaaaaatcaccctacttgaaccagttcagtgagatttcattagcatgctctcattactggcataatcagcttcaaagtcactaagcctctgaaaggaagatgtgttgcttattcttaataaaatggcataaaagtagatcattagtcaccaaacatgatagacttaccttttccatttgttggcatctcacattgtagatggcaattaaaatggaatccagggaaagagggggtggtttgtatagcaatggattatgaaacaaagtactggattattcaccgcttgacattcaggaaacattctgctccttacagaatatggcacgtgggccacagaatcttccgtgtgctaccttctcggtgaagaagagcacccccaagtttcttttcctaggagctaaccacagtaaacccattacacactttagcagaagggctcattctaaaggtcttaggattttaatcattttaaatttcctgttatgcttcaggctcttcaacacaaagtgaatattgtactctttggttttacataattatattcaattgtcatatttcaacaggacattatttgtgactttagatgggtcaataatgattttcattgtcagcagtaaagtcaataattacagacacatcacctaccctacttgtgtaaaagcattttttggtactaggagatttagtgtctgatcaacggtcctggatagcaagtaatatatcccccaaataatgaaaagtgacaagaaaataaatatgtttacttcagaaataaatggaaaattagtgctatctaaaatgtagtcttaagtctcatctgtgtacataaagtaaaatgagttttatgtactagttactcaaatttatcttccactccatttgtatagtaattaaactcttacactcagtaatatacaaattggtaattaacctctttgcaaaatgttaaagtgttcctaaatgtacaataagtctcctttcctgtctcattgtttttcgcttcacgtacctctcatgtaattatttcaatgattgagttcagtgtgaggaggtttatgcctagaaaaggtgctcaccaataacgtgcctcagttcccataatagcaagatcgagaaggttctttagtctcccggaacgtcacgttgaacatctcagttctatattttgccttgacatttgcattatatcagctgatcattgtcttgccctaattttcccttttaatattttagtgaccttctatgttaggtacaggttatttagaagtgttcctccaaggccagatactttttccttgaacaatttatttttaacaacttttagcgattttctcacttcaccaccctccgtttcataagtccacgcaatcacaattcctttctgctaatctgcacagtcaagatataaagtaagaatacctatttgaacatgtagtgagaactttacttctctgccaaaaatgaaggaaaatgctgccacttttgtatgtcacatgttttttattctacagcctcactcacttcatgtcatgttttagtgcagttttctggactaactgcttattttctcattgattaaactgcctatttgctcattggaattagagccaatttttttccttgagggtctgactagaagattaaactatgttcatgtgagaatcaatttctacctaagaaatgagttagaggagttatgggcagcaatatctatctggatgctacactgtgaaaaaggaagcgaggttatgcctttctaccccaatggggtagcagagacctcaggaactgaggtagatgcccccctggttattagcgcccctgaataatttgttcaaaaattgactgctggacaggtgtcgtgttgcacgcctgtagtcccagctgtgcaggaggctgaggcaagaggatctcttgagcccaggaatttgaggctatagtaaactaaggtcacaccactatactccagcctgagcaacaaagcaagaccctgtctctaaatttaaaaaaaaatattgaatgcttatgaatagagactaatataggaagtcataagtatttccttgggatagaatgctttccaccataattgacttgacatcctgtatttttgtatgtgtggacttaagttttaaatatttgaaacacagacaattattaagtcctgcaaatgtgtgagttaatagtggatataacattcccttccagggtgtaagaaaaggtaccacagaagtgagcagccctgaagcacagcctggcctagtttggcaggtctctgtgagttagcagcagactcacgtgaccacactctgtactgccttctgtttctgtttcaccccattaattgtgctaaagaaatgcacttgacacctatgctgtgtaatctcatttagccccaatagcaacaaaagtactaaccccattaaattgagtcatttcaaactgagccaaatgttgcactccagtaaatggagtaggcattggttataatgggaattctccattattcataatggaaaccacaggagtttgttcatgcagatcaaatgtgtcccaccaaggcaagaagtatggaaaagtggtgttgctgtattaccttgtaatttcaaagccttcccgtctgaatcttatttccctgctgtttcctcttgactttggttctttcacaaaggaaaattaagaacacaaatataaacattaagttaaaacacaactgaacaaagtgccaaacttaattggagcatctgaaaatgaaacattaggcagttgcagtggcctcttgataataattcacagtaactctctgtaagctgatcctgtctgaagagcagcaggcacaaggcccctggccatgaagtccatctcaaagggccaggctcagcaaagcaggatgcaaacccaggctttccaaataccaggttggggctcatgtcactgtgccacaggagcttctgtagaaaggctacttgaaaaaagtggccattaaaaatccaggtggatcctatctagggcagtgttggaaacactgatctatgggaggaggagcaggaaggaattgtttaaccactgagcagaaatgttacattgctacctgcctttagcagctgtggctgatgggtaccagttgctaagaagagcattacctaacagtgtattaagatagaaaaatgattttaaagcacggcacttagagaatgttgaagttttactttgctttattttgatttgtttggtttgactttgtctcctggagcatcctccatggatttctgttcattacaagagaaacctagggctctaacccaattcctaattcttggacacattgcacccttgttttgtgataatccagccttcttccttgagaaggtttgctggactggaggttacatgtattgaattttctaaaatgaaggtgcaaagctgtctcctcttatttctttgtggtgctcacttcactgtgagatttcctatcaatacagcccaagtcagtgggcatgcatgaggtggagatgagggagttaggaaggacttggactctcatcaaccatcaggatccctgaatccactaactgttcataatcaaagaagtttgaacaaatacttcacacacatgaaattgccaaaattttgcatttgagttgttataccagtaagtccagttgccatcatctccttgtcacaagtgtcttaaattttgcttttgataataatgattaccactcattcagtactaacttacttgatattagacactgcattaaataccttgcaaacattattttgtttgatcctgacaaccatatgagataggtactattcttatccattaccaaaaaaattaatttcatgaagacttttcccagagagagaaactttaaatatttacacacacacctctctccctgtaacaattccgtagtcctgataacagcaaataagcaaagtctgtgtaggatgctttaccaacagtcccacctagaggcaggagagtgaaccagctagaaaatattttattcatatttcttccagaaaggctccattggagtttgaactcaatttatgttataattttcttattatttttgtattggttttcctgaaaccaatacaaagtaagaaagcattggttccactaaaaatgtcctaaaaccagccaagcacagtggctcacacctataatcccagtactttgggaggccgaggcgggtggatcacttaagccaggagttcaagactagcctggccaacatgacgaaaccccatctctactaaaaatacaaaaattagcagggtgtggtagcacacacctgtaatctcagctactcaggaagctgagacatgagaatcgcttgaacctcagaggcagagattacagtgagcagagatcacgccactgtacttctgcctgggtgacagagcgagactctatctaaaaaaaaataaacacataaatagtaaaatgtcctgaaaccattatggggttaaagcaagaggcagggctggttcccaggattttctgtctaatctccagtgagccacagacctattcctgatcaacttgagaataaacacatcagtaaagatgtgtaaggctgtctgactttcccatttctgtagaattttatttgaagagaagtttctcctttctccaggccccatattgtttatacaaaaagacctttccagtaaatgtccacaaccactaccatcaactaaaatgttttcccactaatgctttcaatggtaatcagtatttaacagggcacttaggattattttttgatcaaccattgtttagatattcccacttataattactcctgtgaaggattgcctcggggcatcagctgatcctgagaaattatccagaagccatgagtgtgtaataatttagtcttaaacctaaataggtcagtattgggtgggacttttctcagctgcataatggggagaataaaaagaatatggaaagaagttacgtaacacatcctgggtcacaaacagaggtaagacttgaacacaggcctgacatcaaagcccatgccagtatgacttacaaaaggtagactggactacctgcatttgagtcactagtgatgcttatcactgggcctcaccaaagaaccttggaatcagaatctttggaggtagatgccaggcacctgcattgttatcaagtgctccagtgattaccattcactgtacagagccaaacagactcctgatgctggaagaaaattacagtgctcaaagtgcagggcagggtgtacatctggatctaaatcactgagcaaccacagggtttcaagagagggtcaaaacaaggactttctgctctctgtggccaaggggacactaagtttgcactgttctcagatctccaaagagactttggtgtatgggggatagggaggggggaagggggtgtgaaataaaaggagaaagtgaatttgattatttgattgatgaaaattgaaaagcttattgtagggcctagcctacagttgatgaaaaaacaatggatcaggaagaagatcagaacttgtctcagtcctcaactgttttcctcaggctttggttgaatattgccatcctgtaattcattatagcattttctgttgcataaacgcttagcaacaaagcctttttttaaaaaaatttgtaactcctcaatgaggattaaatgcttcttcttctaagacagtccgaaatatactcacagctgaaaattcagctaaccgcatttcccaactagccacattctatagaaaactctaagccatgcagatgagtacagacttgacaatagtgctcaaggctgggagtactattcatctgaaaagaatgctccctccaattggtgggccgttattctgctaggtttgtgtttggataattataagatggctatgtttttcttccccagtctcaggaggcccaggtgctgaaacaattggcagagaagagggaacacgagcgagaagtccttcagaaggctttggaggagaacaacaacttcagcaagatggcggaggaaaagctgatcctgaaaatggaacaaattaaggaaaaccgtgaggctaatctagctgctattattgaacgtctgcaggaaaaggtaatctcagcagagtcctgagcagatggatatattcatatgcagcacagctgggtgaacttccatatgcctgagcacagagacgaagtcaaaatttgctgcaggtgtgaggacaactaactcccatgggcagggtctcacagtgtagcattgagttagcaggaggtgcaacatggtagagaaatgggaatccatcatgaaagctggaattttgtcaaattttcccatggtgagtggattcagggaggctgattcatgcttttgaaatgtgtaagacttctatacaagcctcacgaggcaatctgtaggaaaaatgttacactggaaatattaatgtctatatattatattgatataagtataaataacatttgatttaatatttgtttaatatatgacattaaatatatatttaattaaaatattaaattagaaaaatatatttgccagaaaaggccagggtatttatgaacactggtaagcccattctagggtataatagcatcacatgggaccatagcaaagattagctcataggggatgtttcatccagttctggtatcctggtgcccttctcttcaacaacctaaacatatattcattcccatgagtcaggaggagctgtgctggagttcttctgaaaaatgctgtctttcacttttgtactctctatgctgtctcccacctatcccctcaaaaaacctttcctttgaaaatatacagtatagctgtgagtagtttagctgtgtccgtttccagaaattggaataagcattgagaaatgggatgtttgagaaagacgcctcaatccttttctgagcagtcagtcacccttcccgccagtagcaagtgcctttgtgtgataggcattggagatgcagagcaaaacaggagtgtgcctgtcatcagagccctgagagtttaattagatgagcctcctgttttctatttctcagagtttcatgtcttctgttagagatggcccttctcatctaaggttcaaaaaaccttatcctgaagttctgatgattctgttttcattctcagtctctgactgcaaatatccaactagaaacaaaggaaatcaggcatgaaaacttttaaagatataattgcatggagatcttcatttgtgctcgtgaggaatttttgaaagcattgctggggaagggtgtgtgggctctgatgcagcagtaagacactgaggctctcagaggtccgtggacgagtactgctgacttgggcaagaaccggaatagttacctgatgccttatccgaaacatgaaagttcggattaaatttgtatttataagctagtgtttttatactctcagaacaatgtcattgcgtttcacccaagtgagtcaagtcacgatttggaagaggcaacagaatttggctctctccaggtgatttatggcggtataggaacacatgttttactcagatacaggggagcaaagttccatttgctaaagtttactcccctgaccttcaaccagtcagtcttcctccatctgccaccactttgcacttctccagagaactaaggatgttcccgcttgaccagtgctcataacatggacagcagagggccactgtgtgatctctttgagatcactgtgactcaaccttcttctcacatcctaggccctaaaacaattaagtgaagttgctaggaacggtacctgctgatcttattgcagcattctcaattaggcctcaatgcaagatttatatcactggcagtcctggagcatttttgtttttcaaattacacatacccaaacacacggcatagcctccttttttgtttgtttgtttttttgagatagagtctcgctgtgtcgcccaggctggagtgcagtggcacgatctcagctcactgcaacctctgcctcctgggttcaagtgattctcatgtctcagcctcccaagtagctgagattacaggcgtataccaccacgcccagctaatttttgtatttttagtagagacagggttttgccgtgttggccaagctggtctcaaactcctgacctcaagtgatccacccacctcggcctcccgaagtgctgggattacaggtgtgagccaccgtgcccagccagggcatatccttcttgatttcaattgtaaaatagttcaaaaattttccatattttatctaatatttccagaagtgctagcttttaacggaccatttttttcctctgtgtgtttttttctcttcacctagcccagccatgctcagctcatttttgtactctttccactcccaaccaaatttagtgccctcccccatacatgcatacatgtacatctgcacaccacttttcctgcaaataatcaacccaaagagtgcttaaaattcctgacatcaacccacagaatctccaaggatgggacccagcatccatacattttaaaaactctccatatagttccaatatgcagccagatttgagaactagtggttcgtagcctgttctgatttaaatctcagctctcagcagtctatcccacgtcacataatgcagcccagagaaattctaggaccacatttttttctggtatttcatagctaatgaggtgcttttcaaatctaataggatctttggccagtgtcagtcaagatcttttatctcctcaataaaaaggaaataccatatttactttgatttgatgtatatcacataggtggatttaatacaaaattgtggtttacatattgtgaatgtgtatactaaaactactttgctttttcctaaaataagacaaagttttatattggaagtaatatttagcattttgtttgaatgaagttactcctattaaattagaaatttaaaagagggtcagtaataacagtaaagccaaaaggcatgacactgccaacgtaacataagctgctctgaaatctaccatatcaaaagataattatgctgggcatggtggctcacacctgtaatcccagcactttgggaggccaaggcaagagaattgcttgaagccaggagttcgagaccagcctgggaaatataatgataccttgcctcaaacaaaaattcaaaaattagccagcagtggtggcacacttgtaaaaatgcctgtagtcatagctacttcagaggctgagatgaaaggattgcttgggccaaggagttcgagactgcactccaacctgggaaatattgtgccactgcactccaacctgggaaacagaacaagaccctgtctctaaaataaaaagaaaaaaaaagatgaccacttctgaaatgacacctatcaatgagttaatcattcaatgaatatgtattgagtccctactatatgcttaggaacctttgtaatatcattaccaaccatgtctttcccaatacagacaatacaaaattcagcaataaataatatagcaccaacaattagagaataagacaacatgtagtatggtccaatatagacagtaaatacaaagacactgaataatatcagtaaaagtaaattcacatcaaggtcactacaccatgcgcccacccttatgatagccctcactggccctatcaattaagcaagagacatgatacaactctgtgcaagcttttccacaatctgcctaccattcagcactcagtcgctcttcccttcaattaagagaattgagcattcaagcatattttcaccatgatgcccataatggtatcttcaatgtcactgactgataaattcccagaaacccctcagagccccagccatgttagctcaaagcctttagctaaaactgaaagcctaaagcaaaagcagccctggctgcacttcggaatctactggacagctctttaagggattctgatttaatgtctggaatagggccaagaaccttgtattattttaaaggctcactagtaggctctaatatttagccgtggttgagaaccactgtgctaaatgtttcttaaatatgctttgtgatgtcatcataaattatattttagtattttttgtctttgttgcataagtgttctttcttcctccaaagaagaatgttacactcatttcttatttcagtttcctgttttcatagcacctcatcttaacactccaggctattatatagaaaagaatcaaatgtggagaaggctgtgggagaagggatgcctgtgccacaaaggcctgcattaggctgacctattgatgtcatatccaggactcaaaagactagtctgtggattatgactggtgaagttcaaaatgttcttattcttagagtggtatgagaagtagaaagagagagaaacagagaaggggaggagaggggaagagaggaagatgagagaaaggaaagagagggggaaacacctgttcttgacatacaggaatgattcaagacattttcttcctcccctgatgtgtccctttctcccctaacgcactatgcagcatcctgcagaaaattcaccacctgacccttttagaaaccctgagtagtaggagcgccaaatgacccaatcaagaattgcagtgagacagttagttttgaaaaatcagttaaagcatgtataatcattttaacaacaatacatctattcactaaacatataattttaatgtcaaatatttacgtgtaaacatattgaccaatctttcgatgtagttgggcccaataccttttccaaaaattgatcagttaatgggggttctatgggggtttcttttcttgccattattcacacttatgtcacattagctatgatttgcagttttaatttctttaaaattgagtagggactaaagacatctccaaaaagcctggatatagactttttacaacttttccatagcttttatagttgactcacccagtatctactaaatacttcactttctcacgtatttccaaaggtttctctccaccctcacaattttccattaatgtagtacttaattaaattagatagttaaattttcaaatgtgaattgctaaacaggtgtggaaataccattggctataatcaagcatataacacaaccatttgagaaggaaagtatgtggcaatattagggaagagccctttcctctcaagcaattcagcatttaggaaccatcagacagcaggacgatggagggaacagagagggttaacatggcaagttactgaagaggacttctactgaatcttgttgaattccccacttaatccagattgtatcatatcttctttcttttgtaattctaccatatcatcttagtcaatgccaagacttctgagctcataacatggtaacaaataccaaaggagctttcagtatcgtttagaaaggagagaagcaagtaacccagacaaacttgacaactgctttcccctatccaaccatgaagtacagtacttaggaaataaaagaaattgcttcactataattcatcatttcacttctaatatctagaaaatgtcaaatgaaaatattatagccatattttagtggcaatagtagcacataatatgatgcaacttaaaatgataaaaatattttcagggaataagattctgtgattctttccctaagaggtaattttgataatatgtacctgttttgtaaatgtcaatagtcttggggatacaggtggtgtttggttacatggaaaagttccttagtggtgatttctgagattttagtgcacccaatacccaagcagtgtacactgtacccaatatgtagtctttcatccctcgcccccactcccaaccttcccccacaagtctctaaagtccattatatcactcttatatctttgcatactcatagcttagctcccacttatgagaacatatgatagttagtgctcaattcctgagttacttcacttagaataatggcctccagctccacccaagttgctgcaaaagacactatttagttcctttttatggctgagtagtattacatggtgtatatataccacattttatttatccacttgttggtcaatggacacttaacattagttccatatctttgtaatttcaagttgtgctgctataagcatgcatgagcctgtgtctttttcatataattacttcttttcctttgggtagatacccagcagtgggattgctggatcaaatgatagttctactttcagttctttatgttttccacagtggtcatactaatttacattcccatcaacagtgtaaagtgttcccttttcatcacacccatgccaacacctattgttttttgactttttaattacggccattcttgcaggagtaaggtggtatttcattgtggttttaatttgcatttccctgatgttgacaatatttaactctttagttatagattccagctattatcaatttacacctattgcattcttctcatcttttgttttcttgtgattctgatgcacaaatatcatttgtgcaaccacttactgttgaacatgtctgatgaacacttactattgaacatgtctgatgaatgaataatgaaataggaaaagggattaaaactagcctttattaattgtttgctataggccagacatttttggatgtactatcacatttcatccaaacaacaacctaaaagaaaatactgtgattatccccatttcacatctaaggaacctggtctttaggaagattaagtcatttggccaagatcacaagtagaccacagagactagatttgaatgcaagtctgtttgactccaaacctttttactatctgcccatgacccctgatcaccaacatctcaatgtatgaacatgtgctttcttagctcacacaactcactcctgaccccttttttatattgcaagtgcatagtcattagtaaaaagaaggatttttgatgatactgacctcatcttgaatttaattaggctcatatgacagaattccatagatggaattgacatcctaggtcatatagtccaagtccttgtttatatttgatacctagtgagattaaagggacattaaaaagtaaagaaaggaaagacctcatatttcttaccttccagtagagaaatctttctatgaaatcagaggaaagaattagaggaccagaatttttcctaaaatcaactttcatacatcttttttcatataaaaggcatagctgcatacaatgctaaaatattgtattacatttcctttatattgatgggaggaagggggtaaattgcagaaaacattgtaaatttagatatgcttgggcctctgacagtgcctagcaaatatcaggagatcaataatgaaataaatattatcaaagagtagtcttcttgatgaaccttctctgagtatcacaactgctttaggaacctctagattcaaggtctagtaattgcaaacagtgagctgataagaaaaacagactgtatgggaaattacatgcttcctgcatgactgccttttgttctcccacattttgatataaagtcacattaacagttcatgagtaaatattcgataatgtgaacgtaaagtgttcaaataatagagtgactaaaatgcctgaaaacaaataatttttaattagaaactcataatcatttattttctctttttccacattatctcaagctcacaaattatatttattctttcctatggcaaaatccattttgttaacactaattttgagtttaacaagaagtgtactccaaagtagcctaataatactaattataatgtttcctgctatgttatcagtttgaatttatatgaatctttagacttgaggcttctttttcctagcatagtgatggtctgggctttttctcaatttttgccagagctcagctctcactaattagtttctttctgcatgagaaaaagattttgcttcatctttttccttataatagcagaacaaaaagaagaatcagctgcatccatgctaatttcccctgtgacatttccaaacaggatttgatttctctatgcatgcctctttccttctcttcatggtttttgaacatatacaaaagctcatttaaaccaattaaataaaattgtttttaatctctttctctagagtcaacttcctgcttactccaactctgtatctttgaaggaagtatagggtggtctatgccttttttctcccagaatctacacttgaaaagacacatttttccatgcaactataaaatgttctcctcactcaacattgaaattgtatagcagtgattaagagagtgagctgtagagccaggttccctgggtttaaatcccacttgttagtatcatgaagatgggcaagttacttacccttcctgtgtttcagtttcttcatctgcaaaatggggacaataatagaatgtccactataagattattgtgaggattaagggaattaatacaggtaaaacgtgtactgatgcaggtctggtacacattaagtgcctaataaatattcagtattatgatataaagaaccctataagtgtagactccttgagattaatagagtttaacgataagttttactttatagctggtcaagtttatttcttctgaactaaaagaatctatagagtctcaatttctggagcttcagagggaaggagagaagcaatgtaagcaacattctacagaaatataaataatactactaataattagcatcttaaaatttcaattcaatgaacatttatttagcgcctatgatatatgcaagacagtttgattttagtcatctgatgtatagccacatactaaaaaatactgattttagtcatctgatgtatagccacatactaaaaaatacttcctccatcagttccctcctcaggaagttcagttcccaatcccaggctagtaccttggttccttatgtaaataaacatccaccaattacatgctatctgcaaagcactctgctaggccctgcaaatggaaaaaaaaatgataaaacatagtccaggccctcaatgagcttacagtcaaatataatagaggagacaagaacagagaggctcataatacaactagaataaaatgactgccgaataaaaggaaagatttatgcaggtgttcaaatggaaagtgagataagtttgcaggttagtctttgcagtctcataaaaatctttatggagaaaaggacaatggtcatagggcttaaagagtaagtttataatcctgaccagtggagatgaaagactagcattgaaaattgcatgacaagacaattccattaaactgaaacatcaagtgtgtgtaggaaaagatgggggttatgactggaaacgtcacttggactgcaattatgaagggccttgacaaacaggtcaagagtttaagaagcagtatagaaagtcttcgtcctggatctagccctcccagagtgtccatcaggattataaagtccttaaaatattagtcaaaaggaacgacatcattagaaatgatagagaaacaataatgtgatgttttattacctttctctggatttatactctgatcctaatattcaaaactatcttaataacatgaacttttggtcatagttttaaacaaaaacagtgttaaatatattttttaaaacacagtaagtcttgtaagatcttttctaacatgacattttgcagggcccatattttccttctgaaatgggaaaaattcataaaagtagacaccaaactgggttacttctagtcaagcgcatggtacgcaaaggaccagacaaaaagggcctgtgacatttcttcttccttttgtgttttttaggagaggcatgctgcggaggtgcgcaggaacaaggaactccaggttgaactgtctggctgaagcaagggagggtctggcacgccccaccaatagtaaatccccctgcctatattataatggatcatgcgatatcaggatggggaatgtatgacatggtttaaaaagaactcattataaaaaaaaaaaaacaaaaaaaatcaaaaattaaaaaaaatcaatgcggtctctttgcagaatgttttgcttgatgtttaaaaaataccttggatcttattttgtaaatacttacatttttgttaaaaaatacaagtattgcattatgcaagttatttcataatcttacatgtcctgtaacaggcttttgatgttgtgtctttccactcaaatgaatttgctaggtctgttctttttgaagctccccatgtctaactccattccaaaagaaaaatgaggtcagtagacagtctatggtgctagaaacccaccattgcctaatgacctagaaggctttgttgtctctgagcttgactaagaccatacctagatcacaggtattatgactccacatgaaccttcacatttgttcgctcataatctacttactgcctaaaaactacaaaaccaggctaagaaataccaccagtcatagcatttacttctgcttctcctggattatgtgctacaaatgtgctttggctttagaaagggatggatgagaagacagacctgagaccaatctgggtagaagcaaaaagttgaaccttttaaagtgctgaacacaaatccaaattcgaatggttcaagcagccgtgaaatcgctcttcataaagtgggcttaattctctagtttaagttcttttgatggaatgaattaattaatgtgtcaggtggcttatttgtggatgccatgattgatgatgttcattttaagctcttacctatagtacaagtacatgatgctactgaatatttttccacttggaaactgtgagctggttgttgcattaaaacacacatacaaacaaaatcaaaaacactgcggactttcactcaagctggtctttcttccccagtgtaaggcaatcctgcctactaacaacaccaacaacaaaacactccatctgtgaagctgacgcagttaagggggctaggcagggcatttgtgccaactaagaatcaccagatacccaccataagtacctatcgcagttttgaagtcgtttctccccaactcccaactcctgaaggttgctgcctgcatatttactcttcattagtgctattttcctgtatgtcattgtgagcaagctgtgattaataaagaattggagttctgtgaactaataaaggtttggtctgtt

SEQ ID NO: 1342 - DNA, 23 bp, Artificial Sequence
  Description of Artificial Sequence: Synthetic oligonucleotide
atccaattaagagagagtgatgg

SEQ ID NO: 1343 - DNA, 23 bp, Artificial Sequence
  Description of Artificial Sequence: Synthetic oligonucleotide
aatccaattaagagagagtgatg

SEQ ID NO: 1344 - DNA, 23 bp, Artificial Sequence
  Description of Artificial Sequence: Synthetic oligonucleotide
tccaattaagagagagtgatggg

SEQ ID NO: 1345 - DNA, 23 bp, Artificial Sequence
  Description of Artificial Sequence: Synthetic oligonucleotide
gagtcctgcaatatgaatataat

SEQ ID NO: 1346 - DNA, 23 bp, Artificial Sequence
  Description of Artificial Sequence: Synthetic oligonucleotide
gtcctgcaatatgaatataattt

SEQ ID NO: 1347 - DNA, 23 bp, Artificial Sequence
  Description of Artificial Sequence: Synthetic oligonucleotide
gtcttctgccgagtcctgcaata

SEQ ID NO: 1348 - DNA, 23 bp, Artificial Sequence
  Description of Artificial Sequence: Synthetic oligonucleotide
gcacacatgctcacacagagagc

SEQ ID NO: 1349 - DNA, 23 bp, Artificial Sequence
  Description of Artificial Sequence: Synthetic oligonucleotide
acacatgctcacacagagagcca

SEQ ID NO: 1350 - DNA, 21 bp, Artificial Sequence
  Description of Artificial Sequence: Synthetic oligonucleotide
tccaattaagagagagtgatg

SEQ ID NO: 1351 - DNA, 21 bp, Artificial Sequence
  Description of Artificial Sequence: Synthetic oligonucleotide
aatccaattaagagagagtga

SEQ ID NO: 1352 - DNA, 21 bp, Artificial Sequence
  Description of Artificial Sequence: Synthetic oligonucleotide
caattaagagagagtgatggg

SEQ ID NO: 1353 - DNA, 21 bp, Artificial Sequence
  Description of Artificial Sequence: Synthetic oligonucleotide
gtcctgcaatatgaatataat

SEQ ID NO: 1354 - DNA, 21 bp, Artificial Sequence
  Description of Artificial Sequence: Synthetic oligonucleotide
gagtcctgcaatatgaatata

SEQ ID NO: 1355 - DNA, 21 bp, Artificial Sequence
  Description of Artificial Sequence: Synthetic oligonucleotide
cctgcaatatgaatataattt

SEQ ID NO: 1356 - DNA, 21 bp, Artificial Sequence
  Description of Artificial Sequence: Synthetic oligonucleotide
aggtcttctgccgagtcctgc

SEQ ID NO: 1357 - DNA, 21 bp, Artificial Sequence
  Description of Artificial Sequence: Synthetic oligonucleotide
cttctgccgagtcctgcaata

SEQ ID NO: 1358 - DNA, 21 bp, Artificial Sequence
  Description of Artificial Sequence: Synthetic oligonucleotide
acacatgctcacacagagagc

SEQ ID NO: 1359 - DNA, 21 bp, Artificial Sequence
  Description of Artificial Sequence: Synthetic oligonucleotide
gcacacatgctcacacagaga

SEQ ID NO: 1360 - DNA, 21 bp, Artificial Sequence
  Description of Artificial Sequence: Synthetic oligonucleotide
acatgctcacacagagagcca

SEQ ID NO: 1361 - DNA, 19 bp, Artificial Sequence
  Description of Artificial Sequence: Synthetic oligonucleotide
ccaattaagagagagtgat

SEQ ID NO: 1362 - DNA, 19 bp, Artificial Sequence
  Description of Artificial Sequence: Synthetic oligonucleotide
gagtcctgcaatatgaata

SEQ ID NO: 1363 - DNA, 19 bp, Artificial Sequence
  Description of Artificial Sequence: Synthetic oligonucleotide
tgcaatatgaatataattt

SEQ ID NO: 1364 - DNA, 19 bp, Artificial Sequence
  Description of Artificial Sequence: Synthetic oligonucleotide
tctgccgagtcctgcaata

SEQ ID NO: 1365 - DNA, 19 bp, Artificial Sequence
  Description of Artificial Sequence: Synthetic oligonucleotide
gcacacatgctcacacaga

SEQ ID NO: 1366 - DNA, 19 bp, Artificial Sequence
  Description of Artificial Sequence: Synthetic oligonucleotide
atgctcacacagagagcca

SEQ ID NO: 1367 - DNA, 23 bp, Unknown
  Description of Unknown: target sequence
ccatcactctctcttaattggat

SEQ ID NO: 1368 - DNA, 23 bp, Unknown
  Description of Unknown: target sequence
catcactctctcttaattggatt

SEQ ID NO: 1369 - DNA, 23 bp, Unknown
  Description of Unknown: target sequence
cccatcactctctcttaattgga

SEQ ID NO: 1370 - DNA, 23 bp, Unknown
  Description of Unknown: target sequence
attatattcatattgcaggactc

SEQ ID NO: 1371 - DNA, 23 bp, Unknown
  Description of Unknown: target sequence
aaattatattcatattgcaggac

SEQ ID NO: 1372 - DNA, 23 bp, Unknown
  Description of Unknown: target sequence
tattgcaggactcggcagaagac

SEQ ID NO: 1373 - DNA, 23 bp, Unknown
  Description of Unknown: target sequence
gctctctgtgtgagcatgtgtgc

SEQ ID NO: 1374 - DNA, 23 bp, Unknown
  Description of Unknown: target sequence
tggctctctgtgtgagcatgtgt

SEQ ID NO: 1375 - DNA, 21 bp, Unknown
  Description of Unknown: target sequence
catcactctctcttaattgga

SEQ ID NO: 1376 - DNA, 21 bp, Unknown
  Description of Unknown: target sequence
tcactctctcttaattggatt

SEQ ID NO: 1377 - DNA, 21 bp, Unknown
  Description of Unknown: target sequence
cccatcactctctcttaattg

SEQ ID NO: 1378 - DNA, 21 bp, Unknown
  Description of Unknown: target sequence
attatattcatattgcaggac

SEQ ID NO: 1379 - DNA, 21 bp, Unknown
  Description of Unknown: target sequence
tatattcatattgcaggactc

SEQ ID NO: 1380 - DNA, 21 bp, Unknown
  Description of Unknown: target sequence
aaattatattcatattgcagg

SEQ ID NO: 1381 - DNA, 21 bp, Unknown
  Description of Unknown: target sequence
gcaggactcggcagaagacct

SEQ ID NO: 1382 - DNA, 21 bp, Unknown
  Description of Unknown: target sequence
tattgcaggactcggcagaag

SEQ ID NO: 1383 - DNA, 21 bp, Unknown
  Description of Unknown: target sequence
gctctctgtgtgagcatgtgt

SEQ ID NO: 1384 - DNA, 21 bp, Unknown
  Description of Unknown: target sequence
tctctgtgtgagcatgtgtgc

SEQ ID NO: 1385 - DNA, 21 bp, Unknown
  Description of Unknown: target sequence
tggctctctgtgtgagcatgt

SEQ ID NO: 1386 - DNA, 19 bp, Unknown
  Description of Unknown: target sequence
atcactctctcttaattgg

SEQ ID NO: 1387 - DNA, 19 bp, Unknown
  Description of Unknown: target sequence
tattcatattgcaggactc

SEQ ID NO: 1388 - DNA, 19 bp, Unknown
  Description of Unknown: target sequence
aaattatattcatattgca

SEQ ID NO: 1389 - DNA, 19 bp, Unknown
  Description of Unknown: target sequence
tattgcaggactcggcaga

SEQ ID NO: 1390 - DNA, 19 bp, Unknown
  Description of Unknown: target sequence
tctgtgtgagcatgtgtgc

SEQ ID NO: 1391 - DNA, 19 bp, Unknown
  Description of Unknown: target sequence
tggctctctgtgtgagcat

SEQ ID NO: 1392 - RNA, 23 nt, Artificial Sequence
  Description of Artificial Sequence: Synthetic oligonucleotide
auccaauuaagagagagugaugg

SEQ ID NO: 1393 - RNA, 23 nt, Artificial Sequence
  Description of Artificial Sequence: Synthetic oligonucleotide
aauccaauuaagagagagugaug

SEQ ID NO: 1394 - RNA, 23 nt, Artificial Sequence
  Description of Artificial Sequence: Synthetic oligonucleotide
uccaauuaagagagagugauggg

SEQ ID NO: 1395 - RNA, 23 nt, Artificial Sequence
  Description of Artificial Sequence: Synthetic oligonucleotide
gaguccugcaauaugaauauaau

SEQ ID NO: 1396 - RNA, 23 nt, Artificial Sequence
  Description of Artificial Sequence: Synthetic oligonucleotide
guccugcaauaugaauauaauuu

SEQ ID NO: 1397 - RNA, 23 nt, Artificial Sequence
  Description of Artificial Sequence: Synthetic oligonucleotide
gucuucugccgaguccugcaaua

SEQ ID NO: 1398 - RNA, 23 nt, Artificial Sequence
  Description of Artificial Sequence: Synthetic oligonucleotide
gcacacaugcucacacagagagc

SEQ ID NO: 1399 - RNA, 23 nt, Artificial Sequence
  Description of Artificial Sequence: Synthetic oligonucleotide
acacaugcucacacagagagcca

SEQ ID NO: 1400 - RNA, 21 nt, Artificial Sequence
  Description of Artificial Sequence: Synthetic oligonucleotide
uccaauuaagagagagugaug

SEQ ID NO: 1401 - RNA, 21 nt, Artificial Sequence
  Description of Artificial Sequence: Synthetic oligonucleotide
aauccaauuaagagagaguga

SEQ ID NO: 1402 - RNA, 21 nt, Artificial Sequence
  Description of Artificial Sequence: Synthetic oligonucleotide
caauuaagagagagugauggg

SEQ ID NO: 1403 - RNA, 21 nt, Artificial Sequence
  Description of Artificial Sequence: Synthetic oligonucleotide
guccugcaauaugaauauaau

SEQ ID NO: 1404 - RNA, 21 nt, Artificial Sequence
  Description of Artificial Sequence: Synthetic oligonucleotide
gaguccugcaauaugaauaua

SEQ ID NO: 1405 - RNA, 21 nt, Artificial Sequence
  Description of Artificial Sequence: Synthetic oligonucleotide
ccugcaauaugaauauaauuu

SEQ ID NO: 1406 - RNA, 21 nt, Artificial Sequence
  Description of Artificial Sequence: Synthetic oligonucleotide
aggucuucugccgaguccugc

SEQ ID NO: 1407 - RNA, 21 nt, Artificial Sequence
  Description of Artificial Sequence: Synthetic oligonucleotide
cuucugccgaguccugcaaua

SEQ ID NO: 1408 - RNA, 21 nt, Artificial Sequence
  Description of Artificial Sequence: Synthetic oligonucleotide
acacaugcucacacagagagc

SEQ ID NO: 1409 - RNA, 21 nt, Artificial Sequence
  Description of Artificial Sequence: Synthetic oligonucleotide
gcacacaugcucacacagaga

SEQ ID NO: 1410 - RNA, 21 nt, Artificial Sequence
  Description of Artificial Sequence: Synthetic oligonucleotide
acaugcucacacagagagcca

SEQ ID NO: 1411 - RNA, 19 nt, Artificial Sequence
  Description of Artificial Sequence: Synthetic oligonucleotide
ccaauuaagagagagugau

SEQ ID NO: 1412 - RNA, 19 nt, Artificial Sequence
  Description of Artificial Sequence: Synthetic oligonucleotide
gaguccugcaauaugaaua

SEQ ID NO: 1413 - RNA, 19 nt, Artificial Sequence
  Description of Artificial Sequence: Synthetic oligonucleotide
ugcaauaugaauauaauuu

SEQ ID NO: 1414 - RNA, 19 nt, Artificial Sequence
  Description of Artificial Sequence: Synthetic oligonucleotide
ucugccgaguccugcaaua

SEQ ID NO: 1415 - RNA, 19 nt, Artificial Sequence
  Description of Artificial Sequence: Synthetic oligonucleotide
gcacacaugcucacacaga

SEQ ID NO: 1416 - RNA, 19 nt, Artificial Sequence
  Description of Artificial Sequence: Synthetic oligonucleotide
augcucacacagagagcca

SEQ ID NO: 1417 - DNA, 25 bp, Artificial Sequence
  Description of Artificial Sequence: Synthetic oligonucleotide
  modified_base (6)..(6): a, c, t, g, unknown, other, or is absent
  modified_base (11)..(11): a, c, t, g, unknown, other, or is absent
  modified_base (19)..(19): a, c, t, g, unknown, other, or is absent
aatccnattangagagagngatggg

SEQ ID NO: 1418 - DNA, 25 bp, Artificial Sequence
  Description of Artificial Sequence: Synthetic oligonucleotide
  modified_base (7)..(7): a, c, t, g, unknown, other, or is absent
  modified_base (14)..(14): a, c, t, g, unknown, other, or is absent
  modified_base (22)..(22): a, c, t, g, unknown, other, or is absent
gagtccngcaatangaatatanttt

SEQ ID NO: 1419 - DNA, 19 bp, Artificial Sequence
  Description of Artificial Sequence: Synthetic oligonucleotide
  modified_base (5)..(5): a, c, t, g, unknown, other, or is absent
  modified_base (12)..(12): a, c, t, g, unknown, other, or is absent
gtccngcaatangaatata

SEQ ID NO: 1420 - DNA, 25 bp, Artificial Sequence
  Description of Artificial Sequence: Synthetic oligonucleotide
  modified_base (8)..(8): a, c, t, g, unknown, other, or is absent
  modified_base (16)..(16): a, c, t, g, unknown, other, or is absent
  modified_base (21)..(21): a, c, t, g, unknown, other, or is absent
gcacacangctcacanagagngcca

SEQ ID NO: 1421 - DNA, 23 bp, Artificial Sequence
  Description of Artificial Sequence: Synthetic oligonucleotide
cctgcaatatgaatataatttta

SEQ ID NO: 1422 - DNA, 23 bp, Artificial Sequence
  Description of Artificial Sequence: Synthetic oligonucleotide
tgcaatatgaatataattttaaa

SEQ ID NO: 1423 - DNA, 23 bp, Artificial Sequence
  Description of Artificial Sequence: Synthetic oligonucleotide
ctgcaatatgaatataattttaa

SEQ ID NO: 1424 - DNA, 21 bp, Artificial Sequence
  Description of Artificial Sequence: Synthetic oligonucleotide
tgcaatatgaatataatttta

SEQ ID NO: 1425 - DNA, 23 bp, Artificial Sequence
  Description of Artificial Sequence: Synthetic oligonucleotide
tcctgcaatatgaatataatttt

SEQ ID NO: 1426 - DNA, 21 bp, Artificial Sequence
  Description of Artificial Sequence: Synthetic oligonucleotide
ctgcaatatgaatataatttt

SEQ ID NO: 1427 - DNA, 23 bp, Artificial Sequence
  Description of Artificial Sequence: Synthetic oligonucleotide
agtcctgcaatatgaatataatt

SEQ ID NO: 1428 - DNA, 21 bp, Artificial Sequence
  Description of Artificial Sequence: Synthetic oligonucleotide
tcctgcaatatgaatataatt

SEQ ID NO: 1429 - DNA, 23 bp, Artificial Sequence
  Description of Artificial Sequence: Synthetic oligonucleotide
tttctctcgaaggtcttctgccg

SEQ ID NO: 1430 - DNA, 23 bp, Artificial Sequence
  Description of Artificial Sequence: Synthetic oligonucleotide
cctttctctcgaaggtcttctgc

SEQ ID NO: 1431 - DNA, 23 bp, Artificial Sequence
  Description of Artificial Sequence: Synthetic oligonucleotide
ctttctctcgaaggtcttctgcc

SEQ ID NO: 1432 - DNA, 23 bp, Artificial Sequence
  Description of Artificial Sequence: Synthetic oligonucleotide
ctctcgcacacacgcacacatgc

SEQ ID NO: 1433 - DNA, 23 bp, Artificial Sequence
  Description of Artificial Sequence: Synthetic oligonucleotide
ctctctcgcacacacgcacacat

SEQ ID NO: 1434 - DNA, 23 bp, Artificial Sequence
  Description of Artificial Sequence: Synthetic oligonucleotide
tctctcgcacacacgcacacatg

SEQ ID NO: 1435 - DNA, 21 bp, Artificial Sequence
  Description of Artificial Sequence: Synthetic oligonucleotide
ctctcgcacacacgcacacat

SEQ ID NO: 1436 - RNA, 23 nt, Artificial Sequence
  Description of Artificial Sequence: Synthetic oligonucleotide
ccugcaauaugaauauaauuuua

SEQ ID NO: 1437 - RNA, 23 nt, Artificial Sequence
  Description of Artificial Sequence: Synthetic oligonucleotide
ugcaauaugaauauaauuuuaaa

SEQ ID NO: 1438 - RNA, 23 nt, Artificial Sequence
  Description of Artificial Sequence: Synthetic oligonucleotide
cugcaauaugaauauaauuuuaa

SEQ ID NO: 1439 - RNA, 21 nt, Artificial Sequence
  Description of Artificial Sequence: Synthetic oligonucleotide
ugcaauaugaauauaauuuua

SEQ ID NO: 1440 - RNA, 23 nt, Artificial Sequence
  Description of Artificial Sequence: Synthetic oligonucleotide
uccugcaauaugaauauaauuuu

SEQ ID NO: 1441 - RNA, 21 nt, Artificial Sequence
  Description of Artificial Sequence: Synthetic oligonucleotide
cugcaauaugaauauaauuuu

SEQ ID NO: 1442 - RNA, 23 nt, Artificial Sequence
  Description of Artificial Sequence: Synthetic oligonucleotide
aguccugcaauaugaauauaauu

SEQ ID NO: 1443 - RNA, 21 nt, Artificial Sequence
  Description of Artificial Sequence: Synthetic oligonucleotide
uccugcaauaugaauauaauu

SEQ ID NO: 1444 - RNA, 23 nt, Artificial Sequence
  Description of Artificial Sequence: Synthetic oligonucleotide
uuucucucgaaggucuucugccg

SEQ ID NO: 1445 - RNA, 23 nt, Artificial Sequence
  Description of Artificial Sequence: Synthetic oligonucleotide
ccuuucucucgaaggucuucugc

SEQ ID NO: 1446 - RNA, 23 nt, Artificial Sequence
  Description of Artificial Sequence: Synthetic oligonucleotide
cuuucucucgaaggucuucugcc

SEQ ID NO: 1447 - RNA, 23 nt, Artificial Sequence
  Description of Artificial Sequence: Synthetic oligonucleotide
cucucgcacacacgcacacaugc

SEQ ID NO: 1448 - RNA, 23 nt, Artificial Sequence
  Description of Artificial Sequence: Synthetic oligonucleotide
cucucucgcacacacgcacacau

SEQ ID NO: 1449 - RNA, 23 nt, Artificial Sequence
  Description of Artificial Sequence: Synthetic oligonucleotide
ucucucgcacacacgcacacaug

SEQ ID NO: 1450 - RNA, 21 nt, Artificial Sequence
  Description of Artificial Sequence: Synthetic oligonucleotide
cucucgcacacacgcacacau

SEQ ID NO: 1451 - DNA, 25 bp, Artificial Sequence
  Description of Artificial Sequence: Synthetic oligonucleotide
  modified_base (4)..(4): a, c, t, g, unknown, other, or is absent
  modified_base (15)..(15): a, c, t, g, unknown, other, or is absent
gagncctgcaatatnaatataattt

SEQ ID NO: 1452 - DNA, 25 bp, Artificial Sequence
  Description of Artificial Sequence: Synthetic oligonucleotide
  modified_base (11)..(11): a, c, t, g, unknown, other, or is absent
  modified_base (21)..(21): a, c, t, g, unknown, other, or is absent
gagtcctgcantatgaatatnattt

SEQ ID NO: 1453 - DNA, 25 bp, Artificial Sequence
  Description of Artificial Sequence: Synthetic oligonucleotide
  modified_base (7)..(7): a, c, t, g, unknown, other, or is absent
  modified_base (19)..(19): a, c, t, g, unknown, other, or is absent
gagtccngcaatatgaatntaattt

SEQ ID NO: 1454 - DNA, 25 bp, Artificial Sequence
  Description of Artificial Sequence: Synthetic oligonucleotide
  modified_base (7)..(7): a, c, t, g, unknown, other, or is absent
  modified_base (18)..(18): a, c, t, g, unknown, other, or is absent
gagtccngcaatatgaanataattt

SEQ ID NO: 1455 - DNA, 21 bp, Artificial Sequence
  Description of Artificial Sequence: Synthetic oligonucleotide
  modified_base (8)..(8): a, c, t, g, unknown, other, or is absent
  modified_base (16)..(16): a, c, t, g, unknown, other, or is absent
gtcctgcnatatgaanataat

SEQ ID NO: 1456 - DNA, 21 bp, Artificial Sequence
  Description of Artificial Sequence: Synthetic oligonucleotide
  modified_base (6)..(6): a, c, t, g, unknown, other, or is absent
  modified_base (14)..(14): a, c, t, g, unknown, other, or is absent
gtcctncaatatgnatataat

SEQ ID NO: 1457 - DNA, 21 bp, Artificial Sequence
  Description of Artificial Sequence: Synthetic oligonucleotide
  modified_base (8)..(8): a, c, t, g, unknown, other, or is absent
  modified_base (14)..(14): a, c, t, g, unknown, other, or is absent
gtcctgcnatatgnatataat

SEQ ID NO: 1458 - DNA, 25 bp, Artificial Sequence
  Description of Artificial Sequence: Synthetic oligonucleotide
  modified_base (4)..(4): a, c, t, g, unknown, other, or is absent
  modified_base (15)..(15): a, c, t, g, unknown, other, or is absent
gagncctgcaatatnaatataattt

SEQ ID NO: 1459 - DNA, 25 bp, Artificial Sequence
  Description of Artificial Sequence: Synthetic oligonucleotide
  modified_base (11)..(11): a, c, t, g, unknown, other, or is absent
  modified_base (21)..(21): a, c, t, g, unknown, other, or is absent
gagtcctgcantatgaatatnattt

SEQ ID NO: 1460 - DNA, 25 bp, Artificial Sequence
  Description of Artificial Sequence: Synthetic oligonucleotide
  modified_base (7)..(7): a, c, t, g, unknown, other, or is absent
  modified_base (19)..(19): a, c, t, g, unknown, other, or is absent
gagtccngcaatatgaatntaattt

SEQ ID NO: 1461 - DNA, 25 bp, Artificial Sequence
  Description of Artificial Sequence: Synthetic oligonucleotide
  modified_base (7)..(7): a, c, t, g, unknown, other, or is absent
  modified_base (18)..(18): a, c, t, g, unknown, other, or is absent
gagtccngcaatatgaanataattt

SEQ ID NO: 1462 - DNA, 21 bp, Artificial Sequence
  Description of Artificial Sequence: Synthetic oligonucleotide
  modified_base (8)..(8): a, c, t, g, unknown, other, or is absent
  modified_base (16)..(16): a, c, t, g, unknown, other, or is absent
gtcctgcnatatgaanataat

SEQ ID NO: 1463 - DNA, 21 bp, Artificial Sequence
  Description of Artificial Sequence: Synthetic oligonucleotide
  modified_base (6)..(6): a, c, t, g, unknown, other, or is absent
  modified_base (14)..(14): a, c, t, g, unknown, other, or is absent
gtcctncaatatgnatataat

SEQ ID NO: 1464 - DNA, 21 bp, Artificial Sequence
  Description of Artificial Sequence: Synthetic oligonucleotide
  modified_base (8)..(8): a, c, t, g, unknown, other, or is absent
  modified_base (14)..(14): a, c, t, g, unknown, other, or is absent
gtcctgcnatatgnatataat

SEQ ID NO: 1465 - DNA, 25 bp, Artificial Sequence
  Description of Artificial Sequence: Synthetic oligonucleotide
  modified_base (4)..(4): a, c, t, g, unknown, other, or is absent
  modified_base (15)..(15): a, c, t, g, unknown, other, or is absent
gagncctgcaatatnaatataattt

SEQ ID NO: 1466 - DNA, 25 bp, Artificial Sequence
  Description of Artificial Sequence: Synthetic oligonucleotide
  modified_base (11)..(11): a, c, t, g, unknown, other, or is absent
  modified_base (21)..(21): a, c, t, g, unknown, other, or is absent
gagtcctgcantatgaatatnattt

SEQ ID NO: 1467 - DNA, 25 bp, Artificial Sequence
  Description of Artificial Sequence: Synthetic oligonucleotide
  modified_base (7)..(7): a, c, t, g, unknown, other, or is absent
  modified_base (19)..(19): a, c, t, g, unknown, other, or is absent
gagtccngcaatatgaatntaattt

SEQ ID NO: 1468 - DNA, 25 bp, Artificial Sequence
  Description of Artificial Sequence: Synthetic oligonucleotide
  modified_base (7)..(7): a, c, t, g, unknown, other, or is absent
  modified_base (18)..(18): a, c, t, g, unknown, other, or is absent
gagtccngcaatatgaanataattt

SEQ ID NO: 1469 - DNA, 21 bp, Artificial Sequence
  Description of Artificial Sequence: Synthetic oligonucleotide
  modified_base (8)..(8): a, c, t, g, unknown, other, or is absent
  modified_base (16)..(16): a, c, t, g, unknown, other, or is absent
gtcctgcnatatgaanataat

SEQ ID NO: 1470 - DNA, 21 bp, Artificial Sequence
  Description of Artificial Sequence: Synthetic oligonucleotide
  modified_base (6)..(6): a, c, t, g, unknown, other, or is absent
  modified_base (14)..(14): a, c, t, g, unknown, other, or is absent
gtcctncaatatgnatataat

SEQ ID NO: 1471 - DNA, 21 bp, Artificial Sequence
  Description of Artificial Sequence: Synthetic oligonucleotide
  modified_base (8)..(8): a, c, t, g, unknown, other, or is absent
  modified_base (14)..(14): a, c, t, g, unknown, other, or is absent
gtcctgcnatatgnatataat

SEQ ID NO: 1472 - DNA, 25 bp, Artificial Sequence
  Description of Artificial Sequence: Synthetic oligonucleotide
  modified_base (4)..(4): a, c, t, g, unknown, other, or is absent
  modified_base (15)..(15): a, c, t, g, unknown, other, or is absent
gagncctgcaatatnaatataattt

SEQ ID NO: 1473 - DNA, 25 bp, Artificial Sequence
  Description of Artificial Sequence: Synthetic oligonucleotide
  modified_base (11)..(11): a, c, t, g, unknown, other, or is absent
  modified_base (21)..(21): a, c, t, g, unknown, other, or is absent
gagtcctgcantatgaatatnattt

SEQ ID NO: 1474 - DNA, 25 bp, Artificial Sequence
  Description of Artificial Sequence: Synthetic oligonucleotide
  modified_base (7)..(7): a, c, t, g, unknown, other, or is absent
  modified_base (19)..(19): a, c, t, g, unknown, other, or is absent
gagtccngcaatatgaatntaattt

SEQ ID NO: 1475 - DNA, 25 bp, Artificial Sequence
  Description of Artificial Sequence: Synthetic oligonucleotide
  modified_base (7)..(7): a, c, t, g, unknown, other, or is absent
  modified_base (18)..(18): a, c, t, g, unknown, other, or is absent
gagtccngcaatatgaanataattt

SEQ ID NO: 1476 - DNA, 21 bp, Artificial Sequence
  Description of Artificial Sequence: Synthetic oligonucleotide
  modified_base (8)..(8): a, c, t, g, unknown, other, or is absent
  modified_base (16)..(16): a, c, t, g, unknown, other, or is absent
gtcctgcnatatgaanataat

SEQ ID NO: 1477 - DNA, 21 bp, Artificial Sequence
  Description of Artificial Sequence: Synthetic oligonucleotide
  modified_base (6)..(6): a, c, t, g, unknown, other, or is absent
  modified_base (14)..(14): a, c, t, g, unknown, other, or is absent
gtcctncaatatgnatataat

SEQ ID NO: 1478 - DNA, 21 bp, Artificial Sequence
  Description of Artificial Sequence: Synthetic oligonucleotide
  modified_base (8)..(8): a, c, t, g, unknown, other, or is absent
  modified_base (14)..(14): a, c, t, g, unknown, other, or is absent
gtcctgcnatatgnatataat

SEQ ID NO: 1479 - DNA, 25 bp, Artificial Sequence
  Description of Artificial Sequence: Synthetic oligonucleotide
  modified_base (4)..(4): a, c, t, g, unknown, other, or is absent
  modified_base (15)..(15): a, c, t, g, unknown, other, or is absent
gagncctgcaatatnaatataattt

SEQ ID NO: 1480 - DNA, 25 bp, Artificial Sequence
  Description of Artificial Sequence: Synthetic oligonucleotide
  modified_base (11)..(11): a, c, t, g, unknown, other, or is absent
  modified_base (21)..(21): a, c, t, g, unknown, other, or is absent
gagtcctgcantatgaatatnattt

SEQ ID NO: 1481 - DNA, 25 bp, Artificial Sequence
  Description of Artificial Sequence: Synthetic oligonucleotide
  modified_base (7)..(7): a, c, t, g, unknown, other, or is absent
  modified_base (19)..(19): a, c, t, g, unknown, other, or is absent
gagtccngcaatatgaatntaattt

SEQ ID NO: 1482 - DNA, 25 bp, Artificial Sequence
  Description of Artificial Sequence: Synthetic oligonucleotide
  modified_base (7)..(7): a, c, t, g, unknown, other, or is absent
  modified_base (18)..(18): a, c, t, g, unknown, other, or is absent
gagtccngcaatatgaanataattt

SEQ ID NO: 1483 - DNA, 21 bp, Artificial Sequence
  Description of Artificial Sequence: Synthetic oligonucleotide
  modified_base (8)..(8): a, c, t, g, unknown, other, or is absent
  modified_base (16)..(16): a, c, t, g, unknown, other, or is absent
gtcctgcnatatgaanataat

SEQ ID NO: 1484 - DNA, 21 bp, Artificial Sequence
  Description of Artificial Sequence: Synthetic oligonucleotide
  modified_base (6)..(6): a, c, t, g, unknown, other, or is absent
  modified_base (14)..(14): a, c, t, g, unknown, other, or is absent
gtcctncaatatgnatataat

SEQ ID NO: 1485 - DNA, 21 bp, Artificial Sequence
  Description of Artificial Sequence: Synthetic oligonucleotide
  modified_base (8)..(8): a, c, t, g, unknown, other, or is absent
  modified_base (14)..(14): a, c, t, g, unknown, other, or is absent
gtcctgcnatatgnatataat

SEQ ID NO: 1486 - DNA, 25 bp, Artificial Sequence
  Description of Artificial Sequence: Synthetic oligonucleotide
cctttctctcgaaggtcttctgccg

SEQ ID NO: 1487 - DNA, 25 bp, Artificial Sequence
  Description of Artificial Sequence: Synthetic oligonucleotide
  modified_base (9)..(9): a, c, t, g, unknown, other, or is absent
  modified_base (21)..(21): a, c, t, g, unknown, other, or is absent
cctttctcncgaaggtcttcngccg

SEQ ID NO: 1488 - DNA, 23 bp, Artificial Sequence
  Description of Artificial Sequence: Synthetic oligonucleotide
  modified_base (8)..(8): a, c, t, g, unknown, other, or is absent
  modified_base (16)..(16): a, c, t, g, unknown, other, or is absent
ctttctcncgaaggtnttctgcc

SEQ ID NO: 1489 - DNA, 23 bp, Artificial Sequence
  Description of Artificial Sequence: Synthetic oligonucleotide
  modified_base (8)..(8): a, c, t, g, unknown, other, or is absent
  modified_base (16)..(16): a, c, t, g, unknown, other, or is absent
tttctctngaaggtcntctgccg

SEQ ID NO: 1490 - DNA, 23 bp, Artificial Sequence
  Description of Artificial Sequence: Synthetic oligonucleotide
tttctctcgaaggtcttctgccg

SEQ ID NO: 1491 - DNA, 23 bp, Artificial Sequence
  Description of Artificial Sequence: Synthetic oligonucleotide
cctttctctcgaaggtcttctgc

SEQ ID NO: 1492 - DNA, 25 bp, Artificial Sequence
  Description of Artificial Sequence: Synthetic oligonucleotide
  modified_base (9)..(9): a, c, t, g, unknown, other, or is absent
  modified_base (21)..(21): a, c, t, g, unknown, other, or is absent
cctttctcncgaaggtcttcngccg

SEQ ID NO: 1493 - DNA, 23 bp, Artificial Sequence
  Description of Artificial Sequence: Synthetic oligonucleotide
  modified_base (8)..(8): a, c, t, g, unknown, other, or is absent
  modified_base (16)..(16): a, c, t, g, unknown, other, or is absent
ctttctcncgaaggtnttctgcc

SEQ ID NO: 1494 - DNA, 23 bp, Artificial Sequence
  Description of Artificial Sequence: Synthetic oligonucleotide
  modified_base (8)..(8): a, c, t, g, unknown, other, or is absent
  modified_base (16)..(16): a, c, t, g, unknown, other, or is absent
tttctctngaaggtcntctgccg

SEQ ID NO: 1495 - DNA, 25 bp, Artificial Sequence
  Description of Artificial Sequence: Synthetic oligonucleotide
  modified_base (9)..(9): a, c, t, g, unknown, other, or is absent
  modified_base (21)..(21): a, c, t, g, unknown, other, or is absent
cctttctcncgaaggtcttcngccg

SEQ ID NO: 1496 - DNA, 23 bp, Artificial Sequence
  Description of Artificial Sequence: Synthetic oligonucleotide
  modified_base (8)..(8): a, c, t, g, unknown, other, or is absent
  modified_base (16)..(16): a, c, t, g, unknown, other, or is absent
ctttctcncgaaggtnttctgcc

SEQ ID NO: 1497 - DNA, 23 bp, Artificial Sequence
  Description of Artificial Sequence: Synthetic oligonucleotide
  modified_base (8)..(8): a, c, t, g, unknown, other, or is absent
  modified_base (16)..(16): a, c, t, g, unknown, other, or is absent
tttctctngaaggtcntctgccg

SEQ ID NO: 1498 - DNA, 25 bp, Artificial Sequence
  Description of Artificial Sequence: Synthetic oligonucleotide
  modified_base (9)..(9): a, c, t, g, unknown, other, or is absent
  modified_base (21)..(21): a, c, t, g, unknown, other, or is absent
cctttctcncgaaggtcttcngccg

SEQ ID NO: 1499 - DNA, 23 bp, Artificial Sequence
  Description of Artificial Sequence: Synthetic oligonucleotide
  modified_base (8)..(8): a, c, t, g, unknown, other, or is absent
  modified_base (16)..(16): a, c, t, g, unknown, other, or is absent
ctttctcncgaaggtnttctgcc

SEQ ID NO: 1500 - DNA, 23 bp, Artificial Sequence
  Description of Artificial Sequence: Synthetic oligonucleotide
  modified_base (8)..(8): a, c, t, g, unknown, other, or is absent
  modified_base (16)..(16): a, c, t, g, unknown, other, or is absent
tttctctngaaggtcntctgccg

SEQ ID NO: 1501 - DNA, 25 bp, Artificial Sequence
  Description of Artificial Sequence: Synthetic oligonucleotide
  modified_base (9)..(9): a, c, t, g, unknown, other, or is absent
  modified_base (21)..(21): a, c, t, g, unknown, other, or is absent
cctttctcncgaaggtcttcngccg

SEQ ID NO: 1502 - DNA, 23 bp, Artificial Sequence
  Description of Artificial Sequence: Synthetic oligonucleotide
  modified_base (8)..(8): a, c, t, g, unknown, other, or is absent
  modified_base (16)..(16): a, c, t, g, unknown, other, or is absent
ctttctcncgaaggtnttctgcc

SEQ ID NO: 1503 - DNA, 23 bp, Artificial Sequence
  Description of Artificial Sequence: Synthetic oligonucleotide
  modified_base (8)..(8): a, c, t, g, unknown, other, or is absent
  modified_base (16)..(16): a, c, t, g, unknown, other, or is absent
tttctctngaaggtcntctgccg

SEQ ID NO: 1504 - DNA, 25 bp, Artificial Sequence
  Description of Artificial Sequence: Synthetic oligonucleotide
  modified_base (9)..(9): a, c, t, g, unknown, other, or is absent
  modified_base (21)..(21): a, c, t, g, unknown, other, or is absent
cctttctcncgaaggtcttcngccg

SEQ ID NO: 1505 - DNA, 23 bp, Artificial Sequence
  Description of Artificial Sequence: Synthetic oligonucleotide
  modified_base (8)..(8): a, c, t, g, unknown, other, or is absent
  modified_base (16)..(16): a, c, t, g, unknown, other, or is absent
ctttctcncgaaggtnttctgcc

SEQ ID NO: 1506 - DNA, 23 bp, Artificial Sequence
  Description of Artificial Sequence: Synthetic oligonucleotide
  modified_base (8)..(8): a, c, t, g, unknown, other, or is absent
  modified_base (16)..(16): a, c, t, g, unknown, other, or is absent
tttctctngaaggtcntctgccg

SEQ ID NO: 1507 - DNA, 25 bp, Artificial Sequence
  Description of Artificial Sequence: Synthetic oligonucleotide
  modified_base (9)..(9): a, c, t, g, unknown, other, or is absent
  modified_base (21)..(21): a, c, t, g, unknown, other, or is absent
cctttctcncgaaggtcttcngccg

SEQ ID NO: 1508 - DNA, 23 bp, Artificial Sequence
  Description of Artificial Sequence: Synthetic oligonucleotide
  modified_base (8)..(8): a, c, t, g, unknown, other, or is absent
  modified_base (16)..(16): a, c, t, g, unknown, other, or is absent
ctttctcncgaaggtnttctgcc

SEQ ID NO: 1509 - DNA, 23 bp, Artificial Sequence
  Description of Artificial Sequence: Synthetic oligonucleotide
  modified_base (8)..(8): a, c, t, g, unknown, other, or is absent
  modified_base (16)..(16): a, c, t, g, unknown, other, or is absent
tttctctngaaggtcntctgccg

SEQ ID NO: 1510 - DNA, 25 bp, Artificial Sequence
  Description of Artificial Sequence: Synthetic oligonucleotide
  modified_base (4)..(4): a, c, t, g, unknown, other, or is absent
  modified_base (15)..(15): a, c, t, g, unknown, other, or is absent
gagncctgcaatatnaatataattt

SEQ ID NO: 1511 - DNA, 25 bp, Artificial Sequence
  Description of Artificial Sequence: Synthetic oligonucleotide
  modified_base (11)..(11): a, c, t, g, unknown, other, or is absent
  modified_base (21)..(21): a, c, t, g, unknown, other, or is absent
gagtcctgcantatgaatatnattt

SEQ ID NO: 1512 - DNA, 25 bp, Artificial Sequence
  Description of Artificial Sequence: Synthetic oligonucleotide
  modified_base (7)..(7): a, c, t, g, unknown, other, or is absent
  modified_base (19)..(19): a, c, t, g, unknown, other, or is absent
gagtccngcaatatgaatntaattt

SEQ ID NO: 1513 - DNA, 25 bp, Artificial Sequence
  Description of Artificial Sequence: Synthetic oligonucleotide
  modified_base (7)..(7): a, c, t, g, unknown, other, or is absent
  modified_base (18)..(18): a, c, t, g, unknown, other, or is absent
gagtccngcaatatgaanataattt

SEQ ID NO: 1514 - DNA, 21 bp, Artificial Sequence
  Description of Artificial Sequence: Synthetic oligonucleotide
  modified_base (8)..(8): a, c, t, g, unknown, other, or is absent
  modified_base (16)..(16): a, c, t, g, unknown, other, or is absent
gtcctgcnatatgaanataat

SEQ ID NO: 1515 - DNA, 21 bp, Artificial Sequence
  Description of Artificial Sequence: Synthetic oligonucleotide
  modified_base (8)..(8): a, c, t, g, unknown, other, or is absent
  modified_base (14)..(14): a, c, t, g, unknown, other, or is absent
gtcctgcnatatgnatataat

SEQ ID NO: 1516 - DNA, 21 bp, Artificial Sequence
  Description of Artificial Sequence: Synthetic oligonucleotide
  modified_base (6)..(6): a, c, t, g, unknown, other, or is absent
  modified_base (14)..(14): a, c, t, g, unknown, other, or is absent
gtcctncaatatgnatataat

SEQ ID NO: 1517 - DNA, 25 bp, Artificial Sequence
  Description of Artificial Sequence: Synthetic oligonucleotide
  modified_base (7)..(7): a, c, t, g, unknown, other, or is absent
  modified_base (19)..(19): a, c, t, g, unknown, other, or is absent
gagtccngcaatatgaatntaattt

SEQ ID NO: 1518 - DNA, 25 bp, Artificial Sequence
  Description of Artificial Sequence: Synthetic oligonucleotide
  modified_base (7)..(7): a, c, t, g, unknown, other, or is absent
  modified_base (18)..(18): a, c, t, g, unknown, other, or is absent
gagtccngcaatatgaanataattt

SEQ ID NO: 1519 - DNA, 21 bp, Artificial Sequence
  Description of Artificial Sequence: Synthetic oligonucleotide
  modified_base (8)..(8): a, c, t, g, unknown, other, or is absent
  modified_base (16)..(16): a, c, t, g, unknown, other, or is absent
gtcctgcnatatgaanataat

SEQ ID NO: 1520 - DNA, 21 bp, Artificial Sequence
  Description of Artificial Sequence: Synthetic oligonucleotide
  modified_base (8)..(8): a, c, t, g, unknown, other, or is absent
  modified_base (14)..(14): a, c, t, g, unknown, other, or is absent
gtcctgcnatatgnatataat

SEQ ID NO: 1521 - DNA, 21 bp, Artificial Sequence
  Description of Artificial Sequence: Synthetic oligonucleotide
  modified_base (6)..(6): a, c, t, g, unknown, other, or is absent
  modified_base (14)..(14): a, c, t, g, unknown, other, or is absent
gtcctncaatatgnatataat

SEQ ID NO: 1522 - DNA, 25 bp, Artificial Sequence
  Description of Artificial Sequence: Synthetic oligonucleotide
  modified_base (1)..(25): a, c, t, g, unknown or other
nnnnnnnnnnnnnnnnnnnnnnnnn

SEQ ID NO: 1523 - DNA, 25 bp, Artificial Sequence
  Description of Artificial Sequence: Synthetic oligonucleotide
  modified_base (1)..(14): a, c, t, g, unknown or other
  modified_base (15)..(15): a, c, t, g, unknown, other, or is absent
  modified_base (16)..(25): a, c, t, g, unknown or other
nnnnnnnnnnnnnnnnnnnnnnnnn

SEQ ID NO: 1524 - DNA, 23 bp, Artificial Sequence
  Description of Artificial Sequence: Synthetic oligonucleotide
  modified_base (1)..(23): a, c, t, g, unknown or other
nnnnnnnnnnnnnnnnnnnnnnn

SEQ ID NO: 1525 - DNA, 23 bp, Artificial Sequence
  Description of Artificial Sequence: Synthetic oligonucleotide
  modified_base (1)..(11): a, c, t, g, unknown or other
  modified_base (12)..(12): a, c, t, g, unknown, other, or is absent
  modified_base (13)..(23): a, c, t, g, unknown or other
nnnnnnnnnnnnnnnnnnnnnnn

SEQ ID NO: 1526 - DNA, 21 bp, Artificial Sequence
  Description of Artificial Sequence: Synthetic oligonucleotide
  modified_base (1)..(21): a, c, t, g, unknown or other
nnnnnnnnnnnnnnnnnnnnn

SEQ ID NO: 1527 - DNA, 21 bp, Artificial Sequence
  Description of Artificial Sequence: Synthetic oligonucleotide
  modified_base (1)..(10): a, c, t, g, unknown or other
  modified_base (11)..(11): a, c, t, g, unknown, other, or is absent
  modified_base (12)..(21): a, c, t, g, unknown or other
nnnnnnnnnnnnnnnnnnnnn

SEQ ID NO: 1528 - DNA, 19 bp, Artificial Sequence
  Description of Artificial Sequence: Synthetic oligonucleotide
  modified_base (1)..(19): a, c, t, g, unknown or other
nnnnnnnnnnnnnnnnnnn

SEQ ID NO: 1529 - DNA, 19 bp, Artificial Sequence
  Description of Artificial Sequence: Synthetic oligonucleotide
  modified_base (1)..(9): a, c, t, g, unknown or other
  modified_base (10)..(10): a, c, t, g, unknown, other, or is absent
  modified_base (11)..(19): a, c, t, g, unknown or other
nnnnnnnnnnnnnnnnnnn

SEQ ID NO: 1530 - DNA, 25 bp, Artificial Sequence
  Description of Artificial Sequence: Synthetic oligonucleotide
  modified_base (1)..(25): a, c, t, g, unknown or other
nnnnnnnnnnnnnnnnnnnnnnnnn

SEQ ID NO: 1531 - DNA, 25 bp, Artificial Sequence
  Description of Artificial Sequence: Synthetic oligonucleotide
  modified_base (1)..(10): a, c, t, g, unknown or other
  modified_base (11)..(11): a, c, t, g, unknown, other, or is absent
  modified_base (12)..(21): a, c, t, g, unknown or other
  modified_base (22)..(22): a, c, t, g, unknown, other, or is absent
  modified_base (23)..(25): a, c, t, g, unknown or other
nnnnnnnnnnnnnnnnnnnnnnnnn

SEQ ID NO: 1532 - DNA, 25 bp, Artificial Sequence
  Description of Artificial Sequence: Synthetic oligonucleotide
  modified_base (1)..(6): a, c, t, g, unknown or other
  modified_base (7)..(7): a, c, t, g, unknown, other, or is absent
  modified_base (8)..(13): a, c, t, g, unknown or other
  modified_base (14)..(14): a, c, t, g, unknown, other, or is absent
  modified_base (15)..(25): a, c, t, g, unknown or other
nnnnnnnnnnnnnnnnnnnnnnnnn

SEQ ID NO: 1533 - DNA, 25 bp, Artificial Sequence
  Description of Artificial Sequence: Synthetic oligonucleotide
  modified_base (1)..(7): a, c, t, g, unknown or other
  modified_base (8)..(8): a, c, t, g, unknown, other, or is absent
  modified_base (9)..(18): a, c, t, g, unknown or other
  modified_base (19)..(19): a, c, t, g, unknown, other, or is absent
  modified_base (20)..(25): a, c, t, g, unknown or other
nnnnnnnnnnnnnnnnnnnnnnnnn

SEQ ID NO: 1534 - DNA, 25 bp, Artificial Sequence
  Description of Artificial Sequence: Synthetic oligonucleotide
  modified_base (1)..(7): a, c, t, g, unknown or other
  modified_base (8)..(8): a, c, t, g, unknown, other, or is absent
  modified_base (9)..(13): a, c, t, g, unknown or other
  modified_base (14)..(14): a, c, t, g, unknown, other, or is absent
  modified_base (15)..(25): a, c, t, g, unknown or other
nnnnnnnnnnnnnnnnnnnnnnnnn

SEQ ID NO: 1535 - DNA, 25 bp, Artificial Sequence
  Description of Artificial Sequence: Synthetic oligonucleotide
  modified_base (1)..(8): a, c, t, g, unknown or other
  modified_base (9)..(9): a, c, t, g, unknown, other, or is absent
  modified_base (10)..(13): a, c, t, g, unknown or other
  modified_base (14)..(14): a, c, t, g, unknown, other, or is absent
  modified_base (15)..(25): a, c, t, g, unknown or other
nnnnnnnnnnnnnnnnnnnnnnnnn

SEQ ID NO: 1536 - DNA, 25 bp, Artificial Sequence
  Description of Artificial Sequence: Synthetic oligonucleotide
  modified_base (1)..(9): a, c, t, g, unknown or other
  modified_base (10)..(10): a, c, t, g, unknown, other, or is absent
  modified_base (11)..(13): a, c, t, g, unknown or other
  modified_base (14)..(14): a, c, t, g, unknown, other, or is absent
  modified_base (15)..(25): a, c, t, g, unknown or other
nnnnnnnnnnnnnnnnnnnnnnnnn

SEQ ID NO: 1537 - DNA, 25 bp, Artificial Sequence
  Description of Artificial Sequence: Synthetic oligonucleotide
  modified_base (1)..(10): a, c, t, g, unknown or other
  modified_base (11)..(11): a, c, t, g, unknown, other, or is absent
  modified_base (12)..(13): a, c, t, g, unknown or other
  modified_base (14)..(14): a, c, t, g, unknown, other, or is absent
  modified_base (15)..(25): a, c, t, g, unknown or other
nnnnnnnnnnnnnnnnnnnnnnnnn

SEQ ID NO: 1538 - DNA, 25 bp, Artificial Sequence
  Description of Artificial Sequence: Synthetic oligonucleotide
  modified_base (1)..(7): a, c, t, g, unknown or other
  modified_base (8)..(8): a, c, t, g, unknown, other, or is absent
  modified_base (9)..(14): a, c, t, g, unknown or other
  modified_base (15)..(15): a, c, t, g, unknown, other, or is absent
  modified_base (16)..(25): a, c, t, g, unknown or other
nnnnnnnnnnnnnnnnnnnnnnnnn

SEQ ID NO: 1539 - DNA, 25 bp, Artificial Sequence
  Description of Artificial Sequence: Synthetic oligonucleotide
  modified_base (1)..(8): a, c, t, g, unknown or other
  modified_base (9)..(9): a, c, t, g, unknown, other, or is absent
  modified_base (10)..(14): a, c, t, g, unknown or other
  modified_base (15)..(15): a, c, t, g, unknown, other, or is absent
  modified_base (16)..(25): a, c, t, g, unknown or other
nnnnnnnnnnnnnnnnnnnnnnnnn

SEQ ID NO: 1540 - DNA, 25 bp, Artificial Sequence
  Description of Artificial Sequence: Synthetic oligonucleotide
  modified_base (1)..(9): a, c, t, g, unknown or other
  modified_base (10)..(10): a, c, t, g, unknown, other, or is absent
  modified_base (11)..(14): a, c, t, g, unknown or other
  modified_base (15)..(15): a, c, t, g, unknown, other, or is absent
  modified_base (16)..(25): a, c, t, g, unknown or other
nnnnnnnnnnnnnnnnnnnnnnnnn

SEQ ID NO: 1541 - DNA, 25 bp, Artificial Sequence
  Description of Artificial Sequence: Synthetic oligonucleotide
  modified_base (1)..(10): a, c, t, g, unknown or other
  modified_base (11)..(11): a, c, t, g, unknown, other, or is absent
  modified_base (12)..(14): a, c, t, g, unknown or other
  modified_base (15)..(15): a, c, t, g, unknown, other, or is absent
  modified_base (16)..(25): a, c, t, g, unknown or other
nnnnnnnnnnnnnnnnnnnnnnnnn

SEQ ID NO: 1542 - DNA, 25 bp, Artificial Sequence
  Description of Artificial Sequence: Synthetic oligonucleotide
  modified_base (1)..(7): a, c, t, g, unknown or other
  modified_base (8)..(8): a, c, t, g, unknown, other, or is absent
  modified_base (9)..(15): a, c, t, g, unknown or other
  modified_base (16)..(16): a, c, t, g, unknown, other, or is absent
  modified_base (17)..(25): a, c, t, g, unknown or other
nnnnnnnnnnnnnnnnnnnnnnnnn

SEQ ID NO: 1543 - DNA, 25 bp, Artificial Sequence
  Description of Artificial Sequence: Synthetic oligonucleotide
  modified_base (1)..(8): a, c, t, g, unknown or other
  modified_base (9)..(9): a, c, t, g, unknown, other, or is absent
  modified_base (10)..(15): a, c, t, g, unknown or other
  modified_base (16)..(16): a, c, t, g, unknown, other, or is absent
  modified_base (17)..(25): a, c, t, g, unknown or other
nnnnnnnnnnnnnnnnnnnnnnnnn

SEQ ID NO: 1544 - DNA, 25 bp, Artificial Sequence
  Description of Artificial Sequence: Synthetic oligonucleotide
  modified_base (1)..(9): a, c, t, g, unknown or other
  modified_base (10)..(10): a, c, t, g, unknown, other, or is absent
  modified_base (11)..(15): a, c, t, g, unknown or other
  modified_base (16)..(16): a, c, t, g, unknown, other, or is absent
  modified_base (17)..(25): a, c, t, g, unknown or other
nnnnnnnnnnnnnnnnnnnnnnnnn

SEQ ID NO: 1545 - DNA, 25 bp, Artificial Sequence
  Description of Artificial Sequence: Synthetic oligonucleotide
  modified_base (1)..(10): a, c, t, g, unknown or other
  modified_base (11)..(11): a, c, t, g, unknown, other, or is absent
  modified_base (12)..(15): a, c, t, g, unknown or other
  modified_base (16)..(16): a, c, t, g, unknown, other, or is absent
  modified_base (17)..(25): a, c, t, g, unknown or other
nnnnnnnnnnnnnnnnnnnnnnnnn

SEQ ID NO: 1546 - DNA, 25 bp, Artificial Sequence
  Description of Artificial Sequence: Synthetic oligonucleotide
  modified_base (1)..(7): a, c, t, g, unknown or other
  modified_base (8)..(8): a, c, t, g, unknown, other, or is absent
  modified_base (9)..(16): a, c, t, g, unknown or other
  modified_base (17)..(17): a, c, t, g, unknown, other, or is absent
  modified_base (18)..(25): a, c, t, g, unknown or other
nnnnnnnnnnnnnnnnnnnnnnnnn

SEQ ID NO: 1547 - DNA, 25 bp, Artificial Sequence
  Description of Artificial Sequence: Synthetic oligonucleotide
  modified_base (1)..(8): a, c, t, g, unknown or other
  modified_base (9)..(9): a, c, t, g, unknown, other, or is absent
  modified_base (10)..(16): a, c, t, g, unknown or other
  modified_base (17)..(17): a, c, t, g, unknown, other, or is absent
  modified_base (18)..(25): a, c, t, g, unknown or other
nnnnnnnnnnnnnnnnnnnnnnnnn

SEQ ID NO: 1548 - DNA, 25 bp, Artificial Sequence
  Description of Artificial Sequence: Synthetic oligonucleotide
  modified_base (1)..(9): a, c, t, g, unknown or other
  modified_base (10)..(10): a, c, t, g, unknown, other, or is absent
  modified_base (11)..(16): a, c, t, g, unknown or other
  modified_base (17)..(17): a, c, t, g, unknown, other, or is absent
  modified_base (18)..(25): a, c, t, g, unknown or other
nnnnnnnnnnnnnnnnnnnnnnnnn

SEQ ID NO: 1549 - DNA, 25 bp, Artificial Sequence
  Description of Artificial Sequence: Synthetic oligonucleotide
  modified_base (1)..(10): a, c, t, g, unknown or other
  modified_base (11)..(11): a, c, t, g, unknown, other, or is absent
  modified_base (12)..(16): a, c, t, g, unknown or other
  modified_base (17)..(17): a, c, t, g, unknown, other, or is absent
  modified_base (18)..(25): a, c, t, g, unknown or other
nnnnnnnnnnnnnnnnnnnnnnnnn

SEQ ID NO: 1550 - DNA, 25 bp, Artificial Sequence
  Description of Artificial Sequence: Synthetic oligonucleotide
  modified_base (1)..(7): a, c, t, g, unknown or other
  modified_base (8)..(8): a, c, t, g, unknown, other, or is absent
  modified_base (9)..(17): a, c, t, g, unknown or other
  modified_base (18)..(18): a, c, t, g, unknown, other, or is absent
  modified_base (19)..(25): a, c, t, g, unknown or other
nnnnnnnnnnnnnnnnnnnnnnnnn

SEQ ID NO: 1551 - DNA, 25 bp, Artificial Sequence
  Description of Artificial Sequence: Synthetic oligonucleotide
  modified_base (1)..(8): a, c, t, g, unknown or other
  modified_base (9)..(9): a, c, t, g, unknown, other, or is absent
  modified_base (10)..(17): a, c, t, g, unknown or other
  modified_base (18)..(18): a, c, t, g, unknown, other, or is absent
  modified_base (19)..(25): a, c, t, g, unknown or other
nnnnnnnnnnnnnnnnnnnnnnnnn

SEQ ID NO: 1552 - DNA, 25 bp, Artificial Sequence
  Description of Artificial Sequence: Synthetic oligonucleotide
  modified_base (1)..(9): a, c, t, g, unknown or other
  modified_base (10)..(10): a, c, t, g, unknown, other, or is absent
  modified_base (11)..(17): a, c, t, g, unknown or other
  modified_base (18)..(18): a, c, t, g, unknown, other, or is absent
  modified_base (19)..(25): a, c, t, g, unknown or other
nnnnnnnnnnnnnnnnnnnnnnnnn

SEQ ID NO: 1553 - DNA, 25 bp, Artificial Sequence
  Description of Artificial Sequence: Synthetic oligonucleotide
  modified_base (1)..(10): a, c, t, g, unknown or other
  modified_base (11)..(11): a, c, t, g, unknown, other, or is absent
  modified_base (12)..(17): a, c, t, g, unknown or other
  modified_base (18)..(18): a, c, t, g, unknown, other, or is absent
  modified_base (19)..(25): a, c, t, g, unknown or other
nnnnnnnnnnnnnnnnnnnnnnnnn

SEQ ID NO: 1554 - DNA, 25 bp, Artificial Sequence
  Description of Artificial Sequence: Synthetic oligonucleotide
  modified_base (1)..(8): a, c, t, g, unknown or other
  modified_base (9)..(9): a, c, t, g, unknown, other, or is absent
  modified_base (10)..(18): a, c, t, g, unknown or other
  modified_base (19)..(19): a, c, t, g, unknown, other, or is absent
  modified_base (20)..(25): a, c, t, g, unknown or other
nnnnnnnnnnnnnnnnnnnnnnnnn

SEQ ID NO: 1555 - DNA, 25 bp, Artificial Sequence
  Description of Artificial Sequence: Synthetic oligonucleotide
  modified_base (1)..(9): a, c, t, g, unknown or other
  modified_base (10)..(10): a, c, t, g, unknown, other, or is absent
  modified_base (11)..(18): a, c, t, g, unknown or other
  modified_base (19)..(19): a, c, t, g, unknown, other, or is absent
  modified_base (20)..(25): a, c, t, g, unknown or other
nnnnnnnnnnnnnnnnnnnnnnnnn

SEQ ID NO: 1556 - DNA, 25 bp, Artificial Sequence
  Description of Artificial Sequence: Synthetic oligonucleotide
  modified_base (1)..(10): a, c, t, g, unknown or other
  modified_base (11)..(11): a, c, t, g, unknown, other, or is absent
  modified_base (12)..(18): a, c, t, g, unknown or other
  modified_base (19)..(19): a, c, t, g, unknown, other, or is absent
  modified_base (20)..(25): a, c, t, g, unknown or other
nnnnnnnnnnnnnnnnnnnnnnnnn

SEQ ID NO: 1557 - DNA, 25 bp, Artificial Sequence
  Description of Artificial Sequence: Synthetic oligonucleotide
  modified_base (1)..(8): a, c, t, g, unknown or other
  modified_base (9)..(9): a, c, t, g, unknown, other, or is absent
  modified_base (10)..(19): a, c, t, g, unknown or other
  modified_base (20)..(20): a, c, t, g, unknown, other, or is absent
  modified_base (21)..(25): a, c, t, g, unknown or other
nnnnnnnnnnnnnnnnnnnnnnnnn

SEQ ID NO: 1558 - DNA, 25 bp, Artificial Sequence
  Description of Artificial Sequence: Synthetic oligonucleotide
  modified_base (1)..(9): a, c, t, g, unknown or other
  modified_base (10)..(10): a, c, t, g, unknown, other, or is absent
  modified_base (11)..(19): a, c, t, g, unknown or other
  modified_base (20)..(20): a, c, t, g, unknown, other, or is absent
  modified_base (21)..(25): a, c, t, g, unknown or other
nnnnnnnnnnnnnnnnnnnnnnnnn

SEQ ID NO: 1559 - DNA, 25 bp, Artificial Sequence
  Description of Artificial Sequence: Synthetic oligonucleotide
  modified_base (1)..(10): a, c, t, g, unknown or other
  modified_base (11)..(11): a, c, t, g, unknown, other, or is absent
  modified_base (12)..(19): a, c, t, g, unknown or other
  modified_base (20)..(20): a, c, t, g, unknown, other, or is absent
  modified_base (21)..(25): a, c, t, g, unknown or other
nnnnnnnnnnnnnnnnnnnnnnnnn

SEQ ID NO: 1560 - DNA, 25 bp, Artificial Sequence
  Description of Artificial Sequence: Synthetic oligonucleotide
  modified_base (1)..(9): a, c, t, g, unknown or other
  modified_base (10)..(10): a, c, t, g, unknown, other, or is absent
  modified_base (11)..(20): a, c, t, g, unknown or other
  modified_base (21)..(21): a, c, t, g, unknown, other, or is absent
  modified_base (22)..(25): a, c, t, g, unknown or other
nnnnnnnnnnnnnnnnnnnnnnnnn

SEQ ID NO: 1561 - DNA, 25 bp, Artificial Sequence
  Description of Artificial Sequence: Synthetic oligonucleotide
  modified_base (1)..(10): a, c, t, g, unknown or other
  modified_base (11)..(11): a, c, t, g, unknown, other, or is absent
  modified_base (12)..(20): a, c, t, g, unknown or other
  modified_base (21)..(21): a, c, t, g, unknown, other, or is absent
  modified_base (22)..(25): a, c, t, g, unknown or other
nnnnnnnnnnnnnnnnnnnnnnnnn

SEQ ID NO: 1562 - DNA, 25 bp, Artificial Sequence
  Description of Artificial Sequence: Synthetic oligonucleotide
  modified_base (1)..(3): a, c, t, g, unknown or other
  modified_base (4)..(4): a, c, t, g, unknown, other, or is absent
  modified_base (5)..(14): a, c, t, g, unknown or other
  modified_base (15)..(15): a, c, t, g, unknown, other, or is absent
  modified_base (16)..(25): a, c, t, g, unknown or other
nnnnnnnnnnnnnnnnnnnnnnnnn

SEQ ID NO: 1563 - DNA, 25 bp, Artificial Sequence
  Description of Artificial Sequence: Synthetic oligonucleotide
  modified_base (1)..(6): a, c, t, g, unknown or other
  modified_base (7)..(7): a, c, t, g, unknown, other, or is absent
  modified_base (8)..(18): a, c, t, g, unknown or other
  modified_base (19)..(19): a, c, t, g, unknown, other, or is absent
  modified_base (20)..(25): a, c, t, g, unknown or other
nnnnnnnnnnnnnnnnnnnnnnnnn

SEQ ID NO: 1564 - DNA, 25 bp, Artificial Sequence
  Description of Artificial Sequence: Synthetic oligonucleotide
  modified_base (1)..(6): a, c, t, g, unknown or other
  modified_base (7)..(7): a, c, t, g, unknown, other, or is absent
  modified_base (8)..(17): a, c, t, g, unknown or other
  modified_base (18)..(18): a, c, t, g, unknown, other, or is absent
  modified_base (19)..(25): a, c, t, g, unknown or other
nnnnnnnnnnnnnnnnnnnnnnnnn

SEQ ID NO: 1565 - DNA, 25 bp, Artificial Sequence
  Description of Artificial Sequence: Synthetic oligonucleotide
  modified_base (1)..(8): a, c, t, g, unknown or other
  modified_base (9)..(9): a, c, t, g, unknown, other, or is absent
  modified_base (10)..(20): a, c, t, g, unknown or other
  modified_base (21)..(21): a, c, t, g, unknown, other, or is absent
  modified_base (22)..(25): a, c, t, g, unknown or other
nnnnnnnnnnnnnnnnnnnnnnnnn

SEQ ID NO: 1566 - DNA, 25 bp, Artificial Sequence
  Description of Artificial Sequence: Synthetic oligonucleotide
  modified_base (1)..(7): a, c, t, g, unknown or other
  modified_base (8)..(8): a, c, t, g, unknown, other, or is absent
  modified_base (9)..(15): a, c, t, g, unknown or other
  modified_base (16)..(16): a, c, t, g, unknown, other, or is absent
  modified_base (17)..(23): a, c, t, g, unknown or other
  modified_base (24)..(24): a, c, t, g, unknown, other, or is absent
  modified_base (25)..(25): a, c, t, g, unknown or other
nnnnnnnnnnnnnnnnnnnnnnnnn

SEQ ID NO: 1567 - DNA, 25 bp, Artificial Sequence
  Description of Artificial Sequence: Synthetic oligonucleotide
  modified_base (1)..(7): a, c, t, g, unknown or other
  modified_base (8)..(8): a, c, t, g, unknown, other, or is absent
  modified_base (9)..(15): a, c, t, g, unknown or other
  modified_base (16)..(16): a, c, t, g, unknown, other, or is absent
  modified_base (17)..(22): a, c, t, g, unknown or other
  modified_base (23)..(23): a, c, t, g, unknown, other, or is absent
  modified_base (24)..(25): a, c, t, g, unknown or other
nnnnnnnnnnnnnnnnnnnnnnnnn

SEQ ID NO: 1568 - DNA, 25 bp, Artificial Sequence
  Description of Artificial Sequence: Synthetic oligonucleotide
  modified_base (1)..(1): a, c, t, g, unknown or other
  modified_base (2)..(2): a, c, t, g, unknown, other, or is absent
  modified_base (3)..(9): a, c, t, g, unknown or other
  modified_base (10)..(10): a, c, t, g, unknown, other, or is absent
  modified_base (11)..(17): a, c, t, g, unknown or other
  modified_base (18)..(18): a, c, t, g, unknown, other, or is absent
  modified_base (19)..(25): a, c, t, g, unknown or other
nnnnnnnnnnnnnnnnnnnnnnnnn

SEQ ID NO: 1569 - DNA, 25 bp, Artificial Sequence
  Description of Artificial Sequence: Synthetic oligonucleotide
  modified_base (1)..(2): a, c, t, g, unknown or other
  modified_base (3)..(3): a, c, t, g, unknown, other, or is absent
  modified_base (4)..(9): a, c, t, g, unknown or other
  modified_base (10)..(10): a, c, t, g, unknown, other, or is absent
  modified_base (11)..(17): a, c, t, g, unknown or other
  modified_base (18)..(18): a, c, t, g, unknown, other, or is absent
  modified_base (19)..(25): a, c, t, g, unknown or other
nnnnnnnnnnnnnnnnnnnnnnnnn

SEQ ID NO: 1570 - DNA, 25 bp, Artificial Sequence
  Description of Artificial Sequence: Synthetic oligonucleotide
  modified_base (1)..(3): a, c, t, g, unknown or other
  modified_base (4)..(4): a, c, t, g, unknown, other, or is absent
  modified_base (5)..(11): a, c, t, g, unknown or other
  modified_base (12)..(12): a, c, t, g, unknown, other, or is absent
  modified_base (13)..(18): a, c, t, g, unknown or other
  modified_base (19)..(19): a, c, t, g, unknown, other, or is absent
  modified_base (20)..(25): a, c, t, g, unknown or other
nnnnnnnnnnnnnnnnnnnnnnnnn

SEQ ID NO: 1571 - DNA, 25 bp, Artificial Sequence
  Description of Artificial Sequence: Synthetic oligonucleotide
  modified_base (1)..(7): a, c, t, g, unknown or other
  modified_base (8)..(8): a, c, t, g, unknown, other, or is absent
  modified_base (9)..(12): a, c, t, g, unknown or other
  modified_base (13)..(13): a, c, t, g, unknown, other, or is absent
  modified_base (14)..(17): a, c, t, g, unknown or other
  modified_base (18)..(18): a, c, t, g, unknown, other, or is absent
  modified_base (19)..(25): a, c, t, g, unknown or other
nnnnnnnnnnnnnnnnnnnnnnnnn

SEQ ID NO: 1572 - DNA, 25 bp, Artificial Sequence
  Description of Artificial Sequence: Synthetic oligonucleotide
  modified_base (1)..(4): a, c, t, g, unknown or other
  modified_base (5)..(5): a, c, t, g, unknown, other, or is absent
  modified_base (6)..(12): a, c, t, g, unknown or other
  modified_base (13)..(13): a, c, t, g, unknown, other, or is absent
  modified_base (14)..(20): a, c, t, g, unknown or other
  modified_base (21)..(21): a, c, t, g, unknown, other, or is absent
  modified_base (22)..(25): a, c, t, g, unknown or other
nnnnnnnnnnnnnnnnnnnnnnnnn

SEQ ID NO: 1573 - DNA, 25 bp, Artificial Sequence
  Description of Artificial Sequence: Synthetic oligonucleotide
  modified_base (1)..(6): a, c, t, g, unknown or other
  modified_base (7)..(7): a, c, t, g, unknown, other, or is absent
  modified_base (8)..(12): a, c, t, g, unknown or other
  modified_base (13)..(13): a, c, t, g, unknown, other, or is absent
  modified_base (14)..(18): a, c, t, g, unknown or other
  modified_base (19)..(19): a, c, t, g, unknown, other, or is absent
  modified_base (20)..(25): a, c, t, g, unknown or other
nnnnnnnnnnnnnnnnnnnnnnnnn

SEQ ID NO: 1574 - DNA, 25 bp, Artificial Sequence
  Description of Artificial Sequence: Synthetic oligonucleotide
  modified_base (1)..(5): a, c, t, g, unknown or other
  modified_base (6)..(6): a, c, t, g, unknown, other, or is absent
  modified_base (7)..(12): a, c, t, g, unknown or other
  modified_base (13)..(13): a, c, t, g, unknown, other, or is absent
  modified_base (14)..(19): a, c, t, g, unknown or other
  modified_base (20)..(20): a, c, t, g, unknown, other, or is absent
  modified_base (21)..(25): a, c, t, g, unknown or other
nnnnnnnnnnnnnnnnnnnnnnnnn

SEQ ID NO: 1575 - DNA, 25 bp, Artificial Sequence
  Description of Artificial Sequence: Synthetic oligonucleotide
  modified_base (1)..(7): a, c, t, g, unknown or other
  modified_base (8)..(8): a, c, t, g, unknown, other, or is absent
  modified_base (9)..(10): a, c, t, g, unknown or other
  modified_base (11)..(11): a, c, t, g, unknown, other, or is absent
  modified_base (12)..(18): a, c, t, g, unknown or other
  modified_base (19)..(19): a, c, t, g, unknown, other, or is absent
  modified_base (20)..(25): a, c, t, g, unknown or other
nnnnnnnnnnnnnnnnnnnnnnnnn

SEQ ID NO: 1576 - DNA, 23 bp, Artificial Sequence
  Description of Artificial Sequence: Synthetic oligonucleotide
  modified_base (1)..(7): a, c, t, g, unknown or other
  modified_base (8)..(8): a, c, t, g, unknown, other, or is absent
  modified_base (9)..(10): a, c, t, g, unknown or other
  modified_base (11)..(11): a, c, t, g, unknown, other, or is absent
  modified_base (12)..(15): a, c, t, g, unknown or other
  modified_base (16)..(16): a, c, t, g, unknown, other, or is absent
  modified_base (17)..(23): a, c, t, g, unknown or other
nnnnnnnnnnnnnnnnnnnnnnn

SEQ ID NO: 1577 - DNA, 25 bp, Artificial Sequence
  Description of Artificial Sequence: Synthetic oligonucleotide
  modified_base (1)..(6): a, c, t, g, unknown or other
  modified_base (7)..(7): a, c, t, g, unknown, other, or is absent
  modified_base (8)..(13): a, c, t, g, unknown or other
  modified_base (14)..(14): a, c, t, g, unknown, other, or is absent
  modified_base (15)..(21): a, c, t, g, unknown or other
  modified_base (22)..(22): a, c, t, g, unknown, other, or is absent
  modified_base (23)..(25): a, c, t, g, unknown or other
nnnnnnnnnnnnnnnnnnnnnnnnn

SEQ ID NO: 1578 - DNA, 23 bp, Artificial Sequence
  Description of Artificial Sequence: Synthetic oligonucleotide
  modified_base (1)..(23): a, c, t, g, unknown or other
nnnnnnnnnnnnnnnnnnnnnnn

SEQ ID NO: 1579 - DNA, 23 bp, Artificial Sequence
  Description of Artificial Sequence: Synthetic oligonucleotide
  modified_base (1)..(7): a, c, t, g, unknown or other
  modified_base (8)..(8): a, c, t, g, unknown, other, or is absent
  modified_base (9)..(15): a, c, t, g, unknown or other
  modified_base (16)..(16): a, c, t, g, unknown, other, or is absent
  modified_base (17)..(23): a, c, t, g, unknown or other
nnnnnnnnnnnnnnnnnnnnnnn

SEQ ID NO: 1580 - DNA, 21 bp, Artificial Sequence
  Description of Artificial Sequence: Synthetic oligonucleotide
  modified_base (1)..(21): a, c, t, g, unknown or other
nnnnnnnnnnnnnnnnnnnnn

SEQ ID NO: 1581 - DNA, 21 bp, Artificial Sequence
  Description of Artificial Sequence: Synthetic oligonucleotide
  modified_base (1)..(4): a, c, t, g, unknown or other
  modified_base (5)..(5): a, c, t, g, unknown, other, or is absent
  modified_base (6)..(11): a, c, t, g, unknown or other
  modified_base (12)..(12): a, c, t, g, unknown, other, or is absent
  modified_base (13)..(21): a, c, t, g, unknown or other
nnnnnnnnnnnnnnnnnnnnn

SEQ ID NO: 1582 - DNA, 21 bp, Artificial Sequence
  Description of Artificial Sequence: Synthetic oligonucleotide
  modified_base (1)..(7): a, c, t, g, unknown or other
  modified_base (8)..(8): a, c, t, g, unknown, other, or is absent
  modified_base (9)..(15): a, c, t, g, unknown or other
  modified_base (16)..(16): a, c, t, g, unknown, other, or is absent
  modified_base (17)..(21): a, c, t, g, unknown or other
nnnnnnnnnnnnnnnnnnnnn

SEQ ID NO: 1583 - DNA, 21 bp, Artificial Sequence
  Description of Artificial Sequence: Synthetic oligonucleotide
  modified_base (1)..(5): a, c, t, g, unknown or other
  modified_base (6)..(6): a, c, t, g, unknown, other, or is absent
  modified_base (7)..(13): a, c, t, g, unknown or other
  modified_base (14)..(14): a, c, t, g, unknown, other, or is absent
  modified_base (15)..(21): a, c, t, g, unknown or other
nnnnnnnnnnnnnnnnnnnnn

SEQ ID NO: 1584 - DNA, 21 bp, Artificial Sequence
  Description of Artificial Sequence: Synthetic oligonucleotide
  modified_base (1)..(7): a, c, t, g, unknown or other
  modified_base (8)..(8): a, c, t, g, unknown, other, or is absent
  modified_base (9)..(13): a, c, t, g, unknown or other
  modified_base (14)..(14): a, c, t, g, unknown, other, or is absent
  modified_base (15)..(21): a, c, t, g, unknown or other
nnnnnnnnnnnnnnnnnnnnn

SEQ ID NO: 1585 - DNA, 21 bp, Artificial Sequence
  Description of Artificial Sequence: Synthetic oligonucleotide
  modified_base (1)..(5): a, c, t, g, unknown or other
  modified_base (6)..(6): a, c, t, g, unknown, other, or is absent
  modified_base (7)..(19): a, c, t, g, unknown or other
  modified_base (20)..(20): a, c, t, g, unknown, other, or is absent
  modified_base (21)..(21): a, c, t, g, unknown or other
nnnnnnnnnnnnnnnnnnnnn

SEQ ID NO: 1586 - DNA, 19 bp, Artificial Sequence
  Description of Artificial Sequence: Synthetic oligonucleotide
  modified_base (1)..(19): a, c, t, g, unknown or other
nnnnnnnnnnnnnnnnnnn

SEQ ID NO: 1587 - DNA, 19 bp, Artificial Sequence
  Description of Artificial Sequence: Synthetic oligonucleotide
  modified_base (1)..(4): a, c, t, g, unknown or other
  modified_base (5)..(5): a, c, t, g, unknown, other, or is absent
  modified_base (6)..(11): a, c, t, g, unknown or other
  modified_base (12)..(12): a, c, t, g, unknown, other, or is absent
  modified_base (13)..(19): a, c, t, g, unknown or other
nnnnnnnnnnnnnnnnnnn

SEQ ID NO: 1588 - DNA, 19 bp, Artificial Sequence
  Description of Artificial Sequence: Synthetic oligonucleotide
  modified_base (1)..(7): a, c, t, g, unknown or other
  modified_base (8)..(8): a, c, t, g, unknown, other, or is absent
  modified_base (9)..(14): a, c, t, g, unknown or other
  modified_base (15)..(15): a, c, t, g, unknown, other, or is absent
  modified_base (16)..(19): a, c, t, g, unknown or other
nnnnnnnnnnnnnnnnnnn

SEQ ID NO: 1589 - DNA, 25 bp, Artificial Sequence
  Description of Artificial Sequence: Synthetic oligonucleotide
  modified_base (11)..(11): a, c, t, g, unknown, other, or is absent
  modified_base (22)..(22): a, c, t, g, unknown, other, or is absent
aatccaattangagagagtganggg

SEQ ID NO: 1590 - DNA, 25 bp, Artificial Sequence
  Description of Artificial Sequence: Synthetic oligonucleotide
  modified_base (7)..(7): a, c, t, g, unknown, other, or is absent
  modified_base (14)..(14): a, c, t, g, unknown, other, or is absent
gagtccngcaatangaatataattt

SEQ ID NO: 1591 - DNA, 25 bp, Artificial Sequence
  Description of Artificial Sequence: Synthetic oligonucleotide
  modified_base (8)..(8): a, c, t, g, unknown, other, or is absent
  modified_base (19)..(19): a, c, t, g, unknown, other, or is absent
gcacacangctcacacagngagcca

SEQ ID NO: 1592 - DNA, 25 bp, Artificial Sequence
  Description of Artificial Sequence: Synthetic oligonucleotide
  modified_base (8)..(8): a, c, t, g, unknown, other, or is absent
  modified_base (16)..(16): a, c, t, g, unknown, other, or is absent
  modified_base (24)..(24): a, c, t, g, unknown, other, or is absent
aatccaantaagaganagtgatgng

SEQ ID NO: 1593 - DNA, 25 bp, Artificial Sequence
  Description of Artificial Sequence: Synthetic oligonucleotide
  modified_base (8)..(8): a, c, t, g, unknown, other, or is absent
  modified_base (16)..(16): a, c, t, g, unknown, other, or is absent
  modified_base (23)..(23): a, c, t, g, unknown, other, or is absent
aatccaantaagaganagtgatngg

SEQ ID NO: 1594 - DNA, 25 bp, Artificial Sequence
  Description of Artificial Sequence: Synthetic oligonucleotide
  modified_base (2)..(2): a, c, t, g, unknown, other, or is absent
  modified_base (10)..(10): a, c, t, g, unknown, other, or is absent
  modified_base (18)..(18): a, c, t, g, unknown, other, or is absent
antccaattnagagagantgatggg

SEQ ID NO: 1595 - DNA, 23 bp, Artificial Sequence
  Description of Artificial Sequence: Synthetic oligonucleotide
  modified_base (8)..(8): a, c, t, g, unknown, other, or is absent
  modified_base (16)..(16): a, c, t, g, unknown, other, or is absent
tccaattnagagagantgatggg

SEQ ID NO: 1596 - DNA, 25 bp, Artificial Sequence
  Description of Artificial Sequence: Synthetic oligonucleotide
  modified_base (8)..(8): a, c, t, g, unknown, other, or is absent
  modified_base (16)..(16): a, c, t, g, unknown, other, or is absent
  modified_base (24)..(24): a, c, t, g, unknown, other, or is absent
gagtcctncaatatgnatataatnt

SEQ ID NO: 1597 - DNA, 25 bp, Artificial Sequence
  Description of Artificial Sequence: Synthetic oligonucleotide
  modified_base (4)..(4): a, c, t, g, unknown, other, or is absent
  modified_base (12)..(12): a, c, t, g, unknown, other, or is absent
  modified_base (19)..(19): a, c, t, g, unknown, other, or is absent
gagncctgcaanatgaatntaattt

SEQ ID NO: 1598 - DNA, 21 bp, Artificial Sequence
  Description of Artificial Sequence: Synthetic oligonucleotide
  modified_base (8)..(8): a, c, t, g, unknown, other, or is absent
  modified_base (16)..(16): a, c, t, g, unknown, other, or is absent
gtcctgcnatatgaanataat

SEQ ID NO: 1599 - DNA, 21 bp, Artificial Sequence
  Description of Artificial Sequence: Synthetic oligonucleotide
  modified_base (6)..(6): a, c, t, g, unknown, other, or is absent
  modified_base (14)..(14): a, c, t, g, unknown, other, or is absent
gtcctncaatatgnatataat

SEQ ID NO: 1600 - DNA, 25 bp, Artificial Sequence
  Description of Artificial Sequence: Synthetic oligonucleotide
  modified_base (8)..(8): a, c, t, g, unknown, other, or is absent
  modified_base (16)..(16): a, c, t, g, unknown, other, or is absent
  modified_base (23)..(23): a, c, t, g, unknown, other, or is absent
gcacacangctcacanagagagnca

SEQ ID NO: 1601 - DNA, 25 bp, Artificial Sequence
  Description of Artificial Sequence: Synthetic oligonucleotide
  modified_base (3)..(3): a, c, t, g, unknown, other, or is absent
  modified_base (10)..(10): a, c, t, g, unknown, other, or is absent
  modified_base (18)..(18): a, c, t, g, unknown, other, or is absent
gcncacatgntcacacanagagcca

SEQ ID NO: 1602 - DNA, 23 bp, Artificial Sequence
  Description of Artificial Sequence: Synthetic oligonucleotide
  modified_base (8)..(8): a, c, t, g, unknown, other, or is absent
  modified_base (16)..(16): a, c, t, g, unknown, other, or is absent
gcacacangctcacanagagagc

SEQ ID NO: 1603 - DNA, 25 bp, Artificial Sequence
  Description of Artificial Sequence: Synthetic oligonucleotide
  modified_base (4)..(4): a, c, t, g, unknown, other, or is absent
  modified_base (15)..(15): a, c, t, g, unknown, other, or is absent
aatncaattaagagngagtgatggg

SEQ ID NO: 1604 - DNA, 25 bp, Artificial Sequence
  Description of Artificial Sequence: Synthetic oligonucleotide
  modified_base (11)..(11): a, c, t, g, unknown, other, or is absent
  modified_base (21)..(21): a, c, t, g, unknown, other, or is absent
aatccaattangagagagtgntggg

SEQ ID NO: 1605 - DNA, 25 bp, Artificial Sequence
  Description of Artificial Sequence: Synthetic oligonucleotide
  modified_base (7)..(7): a, c, t, g, unknown, other, or is absent
  modified_base (19)..(19): a, c, t, g, unknown, other, or is absent
aatccanttaagagagagngatggg

SEQ ID NO: 1606 - DNA, 25 bp, Artificial Sequence
  Description of Artificial Sequence: Synthetic oligonucleotide
  modified_base (7)..(7): a, c, t, g, unknown, other, or is absent
  modified_base (18)..(18): a, c, t, g, unknown, other, or is absent
aatccanttaagagagantgatggg

SEQ ID NO: 1607 - DNA, 25 bp, Artificial Sequence
  Description of Artificial Sequence: Synthetic oligonucleotide
  modified_base (8)..(8): a, c, t, g, unknown, other, or is absent
  modified_base (13)..(13): a, c, t, g, unknown, other, or is absent
  modified_base (18)..(18): a, c, t, g, unknown, other, or is absent
aatccaantaagngagantgatggg

SEQ ID NO: 1608 - DNA, 25 bp, Artificial Sequence
  Description of Artificial Sequence: Synthetic oligonucleotide
  modified_base (4)..(4): a, c, t, g, unknown, other, or is absent
  modified_base (15)..(15): a, c, t, g, unknown, other, or is absent
gagncctgcaatatnaatataattt

SEQ ID NO: 1609 - DNA, 25 bp, Artificial Sequence
  Description of Artificial Sequence: Synthetic oligonucleotide
  modified_base (11)..(11): a, c, t, g, unknown, other, or is absent
  modified_base (21)..(21): a, c, t, g, unknown, other, or is absent
gagtcctgcantatgaatatnattt

SEQ ID NO: 1610 - DNA, 25 bp, Artificial Sequence
  Description of Artificial Sequence: Synthetic oligonucleotide
  modified_base (7)..(7): a, c, t, g, unknown, other, or is absent
  modified_base (19)..(19): a, c, t, g, unknown, other, or is absent
gagtccngcaatatgaatntaattt

SEQ ID NO: 1611 - DNA, 25 bp, Artificial Sequence
  Description of Artificial Sequence: Synthetic oligonucleotide
  modified_base (7)..(7): a, c, t, g, unknown, other, or is absent
  modified_base (18)..(18): a, c, t, g, unknown, other, or is absent
gagtccngcaatatgaanataattt

SEQ ID NO: 1612 - DNA, 25 bp, Artificial Sequence
  Description of Artificial Sequence: Synthetic oligonucleotide
  modified_base (8)..(8): a, c, t, g, unknown, other, or is absent
  modified_base (13)..(13): a, c, t, g, unknown, other, or is absent
  modified_base (18)..(18): a, c, t, g, unknown, other, or is absent
gagtcctncaatntgaanataattt

SEQ ID NO: 1613 - DNA, 25 bp, Artificial Sequence
  Description of Artificial Sequence: Synthetic oligonucleotide
  modified_base (7)..(7): a, c, t, g, unknown, other, or is absent
  modified_base (13)..(13): a, c, t, g, unknown, other, or is absent
  modified_base (19)..(19): a, c, t, g, unknown, other, or is absent
gagtccngcaatntgaatntaattt

SEQ ID NO: 1614 - DNA, 25 bp, Artificial Sequence
  Description of Artificial Sequence: Synthetic oligonucleotide
  modified_base (6)..(6): a, c, t, g, unknown, other, or is absent
  modified_base (13)..(13): a, c, t, g, unknown, other, or is absent
  modified_base (20)..(20): a, c, t, g, unknown, other, or is absent
gagtcntgcaatntgaatanaattt

SEQ ID NO: 1615 - DNA, 25 bp, Artificial Sequence
  Description of Artificial Sequence: Synthetic oligonucleotide
  modified_base (5)..(5): a, c, t, g, unknown, other, or is absent
  modified_base (13)..(13): a, c, t, g, unknown, other, or is absent
  modified_base (21)..(21): a, c, t, g, unknown, other, or is absent
gagtnctgcaatntgaatatnattt

SEQ ID NO: 1616 - DNA, 21 bp, Artificial Sequence
  Description of Artificial Sequence: Synthetic oligonucleotide
  modified_base (8)..(8): a, c, t, g, unknown, other, or is absent
  modified_base (14)..(14): a, c, t, g, unknown, other, or is absent
gtcctgcnatatgnatataat

SEQ ID NO: 1617 - DNA, 25 bp, Artificial Sequence
  Description of Artificial Sequence: Synthetic oligonucleotide
  modified_base (9)..(9): a, c, t, g, unknown, other, or is absent
  modified_base (21)..(21): a, c, t, g, unknown, other, or is absent
cctttctcncgaaggtcttcngccg

SEQ ID NO: 1618 - DNA, 23 bp, Artificial Sequence
  Description of Artificial Sequence: Synthetic oligonucleotide
  modified_base (8)..(8): a, c, t, g, unknown, other, or is absent
  modified_base (16)..(16): a, c, t, g, unknown, other, or is absent
ctttctcncgaaggtnttctgcc

SEQ ID NO: 1619 - DNA, 23 bp, Artificial Sequence
  Description of Artificial Sequence: Synthetic oligonucleotide
  modified_base (8)..(8): a, c, t, g, unknown, other, or is absent
  modified_base (16)..(16): a, c, t, g, unknown, other, or is absent
tttctctngaaggtcntctgccg

SEQ ID NO: 1620 - DNA, 23 bp, Artificial Sequence
  Description of Artificial Sequence: Synthetic oligonucleotide
  modified_base (8)..(8): a, c, t, g, unknown, other, or is absent
  modified_base (16)..(16): a, c, t, g, unknown, other, or is absent
tctctcgnacacacgnacacatg

SEQ ID NO: 1621 - DNA, 25 bp, Artificial Sequence
  Description of Artificial Sequence: Synthetic oligonucleotide
  modified_base (8)..(8): a, c, t, g, unknown, other, or is absent
  modified_base (13)..(13): a, c, t, g, unknown, other, or is absent
  modified_base (18)..(18): a, c, t, g, unknown, other, or is absent
gcacacangctcncacanagagcca

SEQ ID NO: 1622 - DNA, 23 bp, Artificial Sequence
  Description of Artificial Sequence: Synthetic oligonucleotide
  modified_base (8)..(8): a, c, t, g, unknown, other, or is absent
  modified_base (16)..(16): a, c, t, g, unknown, other, or is absent
tgcaatangaatatanttttaaa

SEQ ID NO: 1623 - DNA, 23 bp, Artificial Sequence
  Description of Artificial Sequence: Synthetic oligonucleotide
  modified_base (8)..(8): a, c, t, g, unknown, other, or is absent
  modified_base (16)..(16): a, c, t, g, unknown, other, or is absent
tcctgcantatgaatntaatttt

SEQ ID NO: 1624 - DNA, 21 bp, Artificial Sequence
  Description of Artificial Sequence: Synthetic oligonucleotide
  modified_base (11)..(11): a, c, t, g, unknown, other, or is absent
ctgcaatatgnatataatttt

SEQ ID NO: 1625 - DNA, 23 bp, Artificial Sequence
  Description of Artificial Sequence: Synthetic oligonucleotide
  modified_base (8)..(8): a, c, t, g, unknown, other, or is absent
  modified_base (16)..(16): a, c, t, g, unknown, other, or is absent
ctgcaatntgaatatnattttaa

SEQ ID NO: 1626 - DNA, 21 bp, Artificial Sequence
  Description of Artificial Sequence: Synthetic oligonucleotide
  modified_base (11)..(11): a, c, t, g, unknown, other, or is absent
cctgcaatatnaatataattt

SEQ ID NO: 1627 - DNA, 21 bp, Artificial Sequence
  Description of Artificial Sequence: Synthetic oligonucleotide
  modified_base (11)..(11): a, c, t, g, unknown, other, or is absent
tcctgcaatangaatataatt

SEQ ID NO: 1628 - DNA, 21 bp, Artificial Sequence
  Description of Artificial Sequence: Synthetic oligonucleotide
  modified_base (8)..(8): a, c, t, g, unknown, other, or is absent
  modified_base (16)..(16): a, c, t, g, unknown, other, or is absent
gtcctgcnatatgaanataat

SEQ ID NO: 1629 - DNA, 21 bp, Artificial Sequence
  Description of Artificial Sequence: Synthetic oligonucleotide
  modified_base (6)..(6): a, c, t, g, unknown, other, or is absent
  modified_base (14)..(14): a, c, t, g, unknown, other, or is absent
gtcctncaatatgnatataat

SEQ ID NO: 1630 - DNA, 21 bp, Artificial Sequence
  Description of Artificial Sequence: Synthetic oligonucleotide
  modified_base (8)..(8): a, c, t, g, unknown, other, or is absent
  modified_base (14)..(14): a, c, t, g, unknown, other, or is absent
gtcctgcnatatgnatataat

SEQ ID NO: 1631 - DNA, 23 bp, Artificial Sequence
  Description of Artificial Sequence: Synthetic oligonucleotide
  modified_base (8)..(8): a, c, t, g, unknown, other, or is absent
  modified_base (16)..(16): a, c, t, g, unknown, other, or is absent
gtcctgcnatatgaanataattt

SEQ ID NO: 1632 - DNA, 25 bp, Artificial Sequence
  Description of Artificial Sequence: Synthetic oligonucleotide
  modified_base (15)..(15): a, c, t, g, unknown, other, or is absent
gagtcctgcaatatnaatataattt

SEQ ID NO: 1633 - DNA, 23 bp, Artificial Sequence
  Description of Artificial Sequence: Synthetic oligonucleotide
  modified_base (8)..(8): a, c, t, g, unknown, other, or is absent
  modified_base (16)..(16): a, c, t, g, unknown, other, or is absent
gtcttctnccgagtcntgcaata

SEQ ID NO: 1634 - DNA, 23 bp, Artificial Sequence
  Description of Artificial Sequence: Synthetic oligonucleotide
  modified_base (12)..(12): a, c, t, g, unknown, other, or is absent
gtcttctgccgngtcctgcaata

SEQ ID NO: 1635 - DNA, 25 bp, Artificial Sequence
  Description of Artificial Sequence: Synthetic oligonucleotide
  modified_base (9)..(9): a, c, t, g, unknown, other, or is absent
  modified_base (19)..(19): a, c, t, g, unknown, other, or is absent
aggtcttcngccgagtccngcaata

SEQ ID NO: 1636 - DNA, 21 bp, Artificial Sequence
  Description of Artificial Sequence: Synthetic oligonucleotide
  modified_base (8)..(8): a, c, t, g, unknown, other, or is absent
  modified_base (16)..(16): a, c, t, g, unknown, other, or is absent
gtcctgcnatatgaanataat

SEQ ID NO: 1637 - DNA, 21 bp, Artificial Sequence
  Description of Artificial Sequence: Synthetic oligonucleotide
  modified_base (6)..(6): a, c, t, g, unknown, other, or is absent
  modified_base (14)..(14): a, c, t, g, unknown, other, or is absent
gtcctncaatatgnatataat

SEQ ID NO: 1638 - DNA, 21 bp, Artificial Sequence
  Description of Artificial Sequence: Synthetic oligonucleotide
  modified_base (8)..(8): a, c, t, g, unknown, other, or is absent
  modified_base (14)..(14): a, c, t, g, unknown, other, or is absent
gtcctgcnatatgnatataat

SEQ ID NO: 1639 - DNA, 23 bp, Artificial Sequence
  Description of Artificial Sequence: Synthetic oligonucleotide
  modified_base (8)..(8): a, c, t, g, unknown, other, or is absent
  modified_base (16)..(16): a, c, t, g, unknown, other, or is absent
gtcttctnccgagtcntgcaata

SEQ ID NO: 1640 - DNA, 23 bp, Artificial Sequence
  Description of Artificial Sequence: Synthetic oligonucleotide
  modified_base (12)..(12): a, c, t, g, unknown, other, or is absent
gtcttctgccgngtcctgcaata

SEQ ID NO: 1641 - DNA, 23 bp, Artificial Sequence
  Description of Artificial Sequence: Synthetic oligonucleotide
  modified_base (12)..(12): a, c, t, g, unknown, other, or is absent
gtcttctgccgngtcctgcaata

SEQ ID NO: 1642 - DNA, 25 bp, Artificial Sequence
  Description of Artificial Sequence: Synthetic oligonucleotide
  modified_base (9)..(9): a, c, t, g, unknown, other, or is absent
  modified_base (21)..(21): a, c, t, g, unknown, other, or is absent
cctttctcncgaaggtcttcngccg

SEQ ID NO: 1643 - DNA, 25 bp, Artificial Sequence
  Description of Artificial Sequence: Synthetic oligonucleotide
  modified_base (9)..(9): a, c, t, g, unknown, other, or is absent
  modified_base (21)..(21): a, c, t, g, unknown, other, or is absent
cctttctcncgaaggtcttcngccg

SEQ ID NO: 1644 - DNA, 23 bp, Artificial Sequence
  Description of Artificial Sequence: Synthetic oligonucleotide
  modified_base (8)..(8): a, c, t, g, unknown, other, or is absent
  modified_base (16)..(16): a, c, t, g, unknown, other, or is absent
ctttctcncgaaggtnttctgcc

SEQ ID NO: 1645 - DNA, 23 bp, Artificial Sequence
  Description of Artificial Sequence: Synthetic oligonucleotide
  modified_base (8)..(8): a, c, t, g, unknown, other, or is absent
  modified_base (16)..(16): a, c, t, g, unknown, other, or is absent
gcacacangctcacanagagagc

SEQ ID NO: 1646 - DNA, 23 bp, Artificial Sequence
  Description of Artificial Sequence: Synthetic oligonucleotide
  modified_base (8)..(8): a, c, t, g, unknown, other, or is absent
  modified_base (16)..(16): a, c, t, g, unknown, other, or is absent
gcacacangctcacanagagagc

SEQ ID NO: 1647 - DNA, 23 bp, Artificial Sequence
  Description of Artificial Sequence: Synthetic oligonucleotide
  modified_base (8)..(8): a, c, t, g, unknown, other, or is absent
  modified_base (16)..(16): a, c, t, g, unknown, other, or is absent
tctctcgnacacacgnacacatg

SEQ ID NO: 1648 - DNA, 23 bp, Artificial Sequence
  Description of Artificial Sequence: Synthetic oligonucleotide
  modified_base (8)..(8): a, c, t, g, unknown, other, or is absent
  modified_base (16)..(16): a, c, t, g, unknown, other, or is absent
tctctcgnacacacgnacacatg

SEQ ID NO: 1649 - DNA, 23 bp, Artificial Sequence
  Description of Artificial Sequence: Synthetic oligonucleotide
  modified_base (8)..(8): a, c, t, g, unknown, other, or is absent
  modified_base (16)..(16): a, c, t, g, unknown, other, or is absent
gtcttctnccgagtcntgcaata

SEQ ID NO: 1650 - DNA, 25 bp, Artificial Sequence
  Description of Artificial Sequence: Synthetic oligonucleotide
ctctctcgcacacacgcacacatgc

SEQ ID NO: 1651 - DNA, 23 bp, Artificial Sequence
  Description of Artificial Sequence: Synthetic oligonucleotide
tctctcgcacacacgcacacatg

SEQ ID NO: 1652 - DNA, 21 bp, Artificial Sequence
  Description of Artificial Sequence: Synthetic oligonucleotide
tttctctcgaaggtcttctgc

SEQ ID NO: 1653 - DNA, 23 bp, Artificial Sequence
  Description of Artificial Sequence: Synthetic oligonucleotide
aaaatccaattaagagagagtga

SEQ ID NO: 1654 - DNA, 23 bp, Artificial Sequence
  Description of Artificial Sequence: Synthetic oligonucleotide
aaatccaattaagagagagtgat

SEQ ID NO: 1655 - DNA, 23 bp, Artificial Sequence
  Description of Artificial Sequence: Synthetic oligonucleotide
taaaaatccaattaagagagagt

SEQ ID NO: 1656 - DNA, 23 bp, Artificial Sequence
  Description of Artificial Sequence: Synthetic oligonucleotide
tttaaaaatccaattaagagaga

SEQ ID NO: 1657 - DNA, 23 bp, Artificial Sequence
  Description of Artificial Sequence: Synthetic oligonucleotide
ttaaaaatccaattaagagagag

SEQ ID NO: 1658 - DNA, 21 bp, Artificial Sequence
  Description of Artificial Sequence: Synthetic oligonucleotide
taaaaatccaattaagagaga

SEQ ID NO: 1659 - DNA, 25 bp, Artificial Sequence
  Description of Artificial Sequence: Synthetic oligonucleotide
cctttctctcgaaggtcttctgccg

SEQ ID NO: 1660 - DNA, 23 bp, Artificial Sequence
  Description of Artificial Sequence: Synthetic oligonucleotide
gcacacatgctcacacagagagc

SEQ ID NO: 1661 - DNA, 23 bp, Artificial Sequence
  Description of Artificial Sequence: Synthetic oligonucleotide
gcacacatgctcacacagagagc

SEQ ID NO: 1662 - DNA, 25 bp, Artificial Sequence
  Description of Artificial Sequence: Synthetic oligonucleotide
gagtcctgcaatatgaatataattt

SEQ ID NO: 1663 - DNA, 25 bp, Artificial Sequence
  Description of Artificial Sequence: Synthetic oligonucleotide
gagtcctgcaatatgaatataattt

SEQ ID NO: 1664 - DNA, 25 bp, Artificial Sequence
  Description of Artificial Sequence: Synthetic oligonucleotide
  modified_base (8)..(8): a, c, t, g, unknown, other, or is absent
  modified_base (11)..(11): a, c, t, g, unknown, other, or is absent
  modified_base (19)..(19): a, c, t, g, unknown, other, or is absent
gcacacangcncacacagngagcca

SEQ ID NO: 1665 - RNA, 19 nt, Unknown
  Description of Unknown: target sequence
gcucaagcauggauucuaa

SEQ ID NO: 1666 - RNA, 19 nt, Unknown
  Description of Unknown: target sequence
caaucaagguaguaauaug

SEQ ID NO: 1667 - RNA, 19 nt, Unknown
  Description of Unknown: target sequence
gggcuucgcuacaggaauc

SEQ ID NO: 1668 - RNA, 19 nt, Unknown
  Description of Unknown: target sequence
caggguggauuugguaaua

SEQ ID NO: 1669 - DNA, 20 bp, Artificial Sequence
  Description of Artificial Sequence: Synthetic oligonucleotide
aaggcttcatattgtacttt

SEQ ID NO: 1670 - DNA, 24 bp, Artificial Sequence
  Description of Artificial Sequence: Synthetic primer
ctcagtgccttattcagtcttctc

SEQ ID NO: 1671 - DNA, 20 bp, Artificial Sequence
  Description of Artificial Sequence: Synthetic primer
tcttctgccgagtcccattt

SEQ ID NO: 1672 - DNA, 24 bp, Artificial Sequence
  Description of Artificial Sequence: Synthetic probe
tcagcgtctgcacatccctacaat

SEQ ID NO: 1673 - DNA, 21 bp, Artificial Sequence
  Description of Artificial Sequence: Synthetic primer
ccacgaactttagcttctcca

SEQ ID NO: 1674 - DNA, 20 bp, Artificial Sequence
  Description of Artificial Sequence: Synthetic primer
gccaattgtttcagcacctg

SEQ ID NO: 1675 - DNA, 26 bp, Artificial Sequence
  Description of Artificial Sequence: Synthetic probe
actttcttctttcctctgcagcctcc

What is claimed is:

1. A compound comprising a modified oligonucleotide comprising a sequence that is between 85 and 98% complementary to an equal length portion of any one of SEQ ID NO: 1339 or SEQ ID NO: 1341, a sequence having 90% identity thereof, or to a 15 to 50 contiguous nucleobase portion thereof, wherein at least one (i.e., one or more) nucleoside linkage of the oligonucleotide is a non-natural linkage, and further wherein the oligonucleotide comprises a spacer.

2. An oligonucleotide comprising a sequence that is between 85 and 98% complementary to an equal length portion of any one of SEQ ID NO: 1339 or SEQ ID NO: 1341, a sequence having 90% identity thereof, or to a 15 to 50 contiguous nucleobase portion thereof, wherein at least one (i.e., one or more) nucleoside linkage of the oligonucleotide is a non-natural linkage, and further wherein the oligonucleotide comprises a spacer.

3. The compound of claim 1 or oligonucleotide of claim 2, wherein the oligonucleotide comprises a segment with at most 11 linked nucleosides.

4. The compound of claim 1 or 3, or oligonucleotide of claim 2 or 3, wherein the oligonucleotide comprises a segment with at most 10, 9, or 8 linked nucleosides.

5. The compound of any one of claim 1 or 3-4 or oligonucleotide of any one of claims 2-4, wherein the oligonucleotide comprises a segment with at most 7 linked nucleosides.

6. The compound of any one of claim 1 or 3-5 or oligonucleotide of any one of claims 1-5, wherein the oligonucleotide comprises a segment with at most 6, 5, 4, 3, or 2 linked nucleosides.

7. The compound of any one of claim 1 or 3-6 or oligonucleotide of any one of claims 1-6, wherein every segment of the oligonucleotide comprises at most 7 linked nucleosides.

8. The compound or oligonucleotide of any one of claims 3-7, wherein the oligonucleotide comprises a sequence that shares at least 85% identity with an equal length portion of any one of SEQ ID NOs: 1-466, SEQ ID NOs: 893-1338, SEQ ID NOs: 1342-1366, or SEQ ID NOs: 1392-1664.

9. The compound or oligonucleotide of any one of claims 3-8, wherein the oligonucleotide comprises a sequence that shares at least 90% identity with an equal length portion of any one of SEQ ID NOs: 1-466, SEQ ID NOs: 893-1338, SEQ ID NOs: 1342-1366, or SEQ ID NOs: 1392-1664.

10. The compound or oligonucleotide of any one of claims 3-9, wherein the oligonucleotide comprises a sequence that shares at least 95% identity with an equal length portion of any one of SEQ ID NOs: 1451-1664.

11. The compound or oligonucleotide of any one of claims 3-9, wherein the oligonucleotide comprises a sequence that shares 100% identity with an equal length portion of any one of SEQ ID NOs: 1451-1664.

12. The compound of claim 1 or oligonucleotide of claim 2, wherein the oligonucleotide comprises a segment with at most 11 linked nucleosides or at most 7 linked nucleosides, and wherein the oligonucleotide comprises a sequence that is between 85 and 98% complementary to an equal length portion within any one of positions 144-168, 173-197, 185-209, or 237-261 of SEQ ID NO: 1339.

13. The compound or oligonucleotide of claim 12, wherein the oligonucleotide comprises a segment with at most 11 linked nucleosides or at most 7 linked nucleosides, and wherein the oligonucleotide comprises a sequence that is between 85 and 98% complementary to an equal length portion of nucleobases within any one of positions 144-164, 144-166, 145-167, 146-166, 146-168, 147-165, or 148-168 of SEQ ID NO: 1339.

14. The compound or oligonucleotide of claim 12, wherein the oligonucleotide comprises a segment with at most 11 linked nucleosides or at most 7 linked nucleosides, and wherein the oligonucleotide comprises a sequence that is between 85 and 98% complementary to an equal length portion of nucleobases within any one of positions 173-191, 173-193, 173-195, 173-197, 175-195, 175-197, 177-197, or 179-197 of SEQ ID NO: 1339.

15. The compound or oligonucleotide of claim 12, wherein the oligonucleotide comprises a segment with at most 11 linked nucleosides or at most 7 linked nucleosides, and wherein the oligonucleotide comprises a sequence that is between 85 and 98% complementary to an equal length portion of nucleobases within any one of positions 185-205, 187-209, 189-209, or 191-209 of SEQ ID NO: 1339.

16. The compound or oligonucleotide of claim 12, wherein the oligonucleotide comprises a segment with at most 11 linked nucleosides or at most 7 linked nucleosides, and wherein the oligonucleotide comprises a sequence that is between 85 and 98% complementary to an equal length portion of nucleobases within any one of positions 237-255, 237-259, 239-259, 239-261, 241-261, or 243-261 of SEQ ID NO: 1339.

17. The compound or oligonucleotide of claim 12, wherein the oligonucleotide comprises a segment with at most 6, 5, 4, 3, or 2 linked nucleosides, and wherein the oligonucleotide comprises a sequence that is between 85 and 98% complementary to an equal length portion of nucleobases within any one of positions 144-168, 173-197, 185-209, or 237-261 of SEQ ID NO: 1339.

18. The compound or oligonucleotide of claim 12, wherein the oligonucleotide comprises a segment with at most 6, 5, 4, 3, or 2 linked nucleosides, and wherein the oligonucleotide comprises a sequence that is between 85 and 98% complementary to an equal length portion of nucleobases within any one of positions 144-164, 144-166, 145-167, 146-166, 146-168, 147-165, 148-168, 173-191, 173-193, 173-195, 173-197, 175-195, 175-197, 177-197, 179-197, 185-205, 187-209, 189-209, 191-209, 237-255, 237-259, 239-259, 239-261, 241-261, or 243-261 of SEQ ID NO: 1339.

19. The compound or oligonucleotide of claim 12, wherein the oligonucleotide comprises a segment with at most 11 linked nucleosides or at most 7 linked nucleosides, and wherein the oligonucleotide comprises a sequence that shares at least 85% identity with an equal length portion of any one of SEQ ID NOs: 1-466, SEQ ID NOs: 893-1338, SEQ ID NOs: 1342-1366, or SEQ ID NOs: 1392-1664.

20. The compound or oligonucleotide of claim 19, wherein the oligonucleotide comprises a segment with at most 6, 5, 4, 3, or 2 linked nucleosides, and wherein the oligonucleotide comprises a sequence that shares at least 85% identity with an equal length portion of any one of SEQ ID NOs: 36, 55, 144, 173, 177, 181, 185, 197, 203, 209, 215, 237, 244, 252, 380, 385, 390, 395, 400, 928, 947, 1036, 1065, 1069, 1073, 1077, 1089, 1095, 1101, 1107, 1129, 1136, 1144, 1272, 1277, 1282, 1287, or 1292.

21. The compound or oligonucleotide of claim 19 or 20, wherein the oligonucleotide comprises a segment with at most 6, 5, 4, 3, or 2 linked nucleosides, and wherein the oligonucleotide comprises a sequence that shares at least 90% identity with an equal length portion of any one of SEQ ID NOs: 36, 55, 144, 173, 177, 181, 185, 197, 203, 209, 215, 237, 244, 252, 380, 385, 390, 395, 400, 928, 947, 1036, 1065, 1069, 1073, 1077, 1089, 1095, 1101, 1107, 1129, 1136, 1144, 1272, 1277, 1282, 1287, or 1292.

22. The compound of any one of claims 1 and 3-21 or oligonucleotide of any one of claims 2-21, wherein the oligonucleotide is at least 18, at least 19, at least 20, at least 21, at least 22, at least 23, at least 24, or at least 25 oligonucleotide units in length.

23. The compound of claim 21 or oligonucleotide of claim 21, wherein the oligonucleotide is at least 19 oligonucleotide units in length.

24. The compound of any one of claims 1 and 3-23 or oligonucleotide of any one of claims 2-23, wherein the spacer is a nucleoside-replacement group comprising a non-sugar substitute that is incapable of linking to a nucleotide base.

25. The compound or oligonucleotide of claim 24, wherein the spacer is located between positions 10 and 15 of the oligonucleotide.

26. The compound or oligonucleotide of claim 24, wherein the spacer is located between positions 7 and 11 of the oligonucleotide.

27. The compound or oligonucleotide of claim 24 or 26, wherein the oligonucleotide further comprises a second spacer, wherein the second spacer is located between positions 14 and 22 of the oligonucleotide.

28. The compound or oligonucleotide of claim 27, wherein the spacer and the second spacer are separated by at least 5 nucleobases, at least 6 nucleobases, or at least 7 nucleobases in the oligonucleotide.

29. The compound or oligonucleotide of claim 27 or 28, wherein the spacer is located between positions 7 and 9 of the oligonucleotide, and wherein the second spacer is located between positions 15 and 18 of the oligonucleotide.

30. The compound or oligonucleotide of any one of claims 27-29, wherein the spacer is located at position 8 of the oligonucleotide, and wherein the second spacer is located at position 16 of the oligonucleotide.

31. The compound or oligonucleotide of any one of claims 27-30, wherein the oligonucleotide further comprises a third spacer, wherein the third spacer is located between positions 21 and 24 of the oligonucleotide.

32. The compound or oligonucleotide of claim 24, wherein the spacer is located between positions 2 and 5 of the oligonucleotide.

33. The compound or oligonucleotide of claim 32, wherein the oligonucleotide further comprises a second spacer, wherein the second spacer is located between positions 8 and 12 of the oligonucleotide.

34. The compound or oligonucleotide of claim 33, wherein the oligonucleotide further comprises a third spacer, wherein the third spacer is located between positions 18 and 22 of the oligonucleotide.

35. The compound or oligonucleotide of claim 24, wherein the oligonucleotide further comprises a second spacer and a third spacer, wherein the three spacers are located at positions in the oligonucleotide such that each segment of the oligonucleotide has at most 7 linked nucleosides.

36. The compound or oligonucleotide of claim 35, wherein at least two of the three spacers are adjacent to a guanine nucleobase.

37. The compound or oligonucleotide of claim 36, wherein each of the at least two of the three spacers immediately precede a guanine nucleobase.

38. The compound or oligonucleotide of any one of claims 24-37, wherein each of the first, second or third spacers is a nucleoside-replacement group comprising a non-sugar substitute wherein the non-sugar substitute does not contain a ketone, aldehyde, ketal, hemiketal, acetal, hemiacetal, aminal or hemiaminal moiety and is incapable of forming a covalent bond with a nucleotide base.

39. The compound or oligonucleotide of any one of claims 24-37, wherein each of the first, second or third spacers is independently represented by Formula (X), wherein: [chemical structure]
Ring A is an optionally substituted 4-8 member monocyclic cycloalkyl group or a 4-8 member monocyclic heterocyclyl group, wherein the heterocyclyl group contains 1 or 2 heteroatoms selected from O, S and N, provided that A is not capable of forming a covalent bond to a nucleobase; and
the [chemical structure]
symbol represents the point of connection to an internucleoside linkage.

40. The compound or oligonucleotide of claim 39, wherein each of the first, second or third spacers is independently represented by Formula (Xa), wherein:

[chemical structure]

41. The compound or nucleotide of claim 39 or 40, wherein ring A is an optionally substituted 4-8 member monocyclic cycloalkyl group selected from cyclobutyl, cyclopentyl, cyclohexyl, cycloheptyl and cyclooctyl; or a 4-8 member monocyclic heterocyclyl group, selected from oxetanyl, tetrahydrofuranyl, tetrahydropyranyl, 1,4-dioxanyl, 216yrrolidinyl, piperidinyl, piperazinyl, morpholinyl and azepanyl.

42. The compound or nucleotide of claim 41 wherein ring A is tetrahydrofuranyl.

43. The compound or nucleotide of claim 41 wherein ring A is tetrahydropyranyl.

44. The compound or oligonucleotide of any one of claims 24-37, wherein each of the first, second or third spacers is independently represented by Formula I, wherein: [chemical structure]
X is selected from —CH₂— and —O—; and
n is 0, 1, 2 or 3.

45. The compound or oligonucleotide of any one of claims 24-37, wherein each of the first, second or third spacers is independently represented by Formula I′, wherein: [chemical structure]
X is selected from —CH₂— and —O—; and
n is 0, 1, 2 or 3.

46. The compound or oligonucleotide of any one of claims 24-37, wherein each of the first, second or third spacers is independently represented by Formula (Ia), wherein: [chemical structure]
and
n is 0, 1, 2 or 3.

47. The compound or oligonucleotide of any one of claims 24-37, wherein each of the first, second or third spacers is independently represented by Formula (Ia′), wherein: [chemical structure]
and
n is 0, 1, 2 or 3.

48. The compound or oligonucleotide of any one of claims 24-37, wherein each of the first, second or third spacers is independently represented by Formula II, wherein: [chemical structure]
and
X is selected from —CH₂— and —O—.

49. The compound or oligonucleotide of any one of claims 24-37, wherein each of the first, second or third spacers is independently represented by Formula II′, wherein: [chemical structure]
and
X is selected from —CH₂— and —O—.

50. The compound or oligonucleotide of any one of claims 24-37, wherein each of the first, second or third spacers is independently represented by Formula (Iia), wherein:

[chemical structure]

51. The compound or oligonucleotide of any one of claims 24-37, wherein each of the first, second or third spacers is independently represented by Formula (Iia′), wherein:

[chemical structure]

52. The compound or oligonucleotide of any one of claims 24-37, wherein each of the first, second or third spacers is independently represented by Formula III, wherein: [chemical structure]
and
X is selected from —CH₂— and —O—.

53. The compound or oligonucleotide of any one of claims 24-37, wherein each of the first, second or third spacers is independently represented by Formula III′, wherein: [chemical structure]
and
X is selected from —CH₂— and —O—.

54. The compound or oligonucleotide of any one of claims 24-37, wherein each of the first, second or third spacers is independently represented by Formula (IIIa), wherein:

[chemical structure]

55. The compound or oligonucleotide of any one of claims 24-37, wherein each of the first, second or third spacers is independently represented by Formula (IIIa′), wherein:

[chemical structure]

56. The compound or oligonucleotide of any one of the above claims, wherein the oligonucleotide comprising the spacer has a GC content of at least 10%.

57. The compound or oligonucleotide of any one of the above claims, wherein the oligonucleotide comprising the spacer has a GC content of at least 20%.

58. The compound or oligonucleotide of any one of the above claims, wherein the oligonucleotide comprising the spacer has a GC content of at least 25%.

59. The compound or oligonucleotide of any one of the above claims, wherein the oligonucleotide comprising the spacer has a GC content of at least 30%.

60. The compound or oligonucleotide of any one of the above claims, wherein the oligonucleotide comprising the spacer has a GC content of at least 40%.

61. The compound or oligonucleotide of any one of the above claims, wherein the oligonucleotide comprising the spacer has a GC content of at least 50%.

62. The compound or oligonucleotide of any one of the above claims, wherein the oligonucleotide is between 12 and 40 oligonucleotide units in length.

63. The compound or oligonucleotide of any one of the above claims, wherein at least one (i.e., one or more) nucleoside linkage of the oligonucleotide is independently selected from the group consisting of a phosphodiester linkage, a phosphorothioate linkage, an alkyl phosphate linkage, a phosphorodithioate linkage, a phosphotriester linkage, an alkylphosphonate linkage, a 3-methoxypropyl phosphonate linkage, a methylphosphonate linkage, an aminoalkylphosphotriester linkage, an alkylene phosphonate linkage, a phosphinate linkage, a phosphoramidate linkage, a phosphoramidothioate linkage, a thiophosphorodiamidate linkage, a phosphorodiamidate linkage, an aminoalkylphosphoramidate linkage, a thiophosphoramidate linkage, a thionoalkylphosphonate linkage, a thionoalkylphosphotriester linkage, a thiophosphate linkage, a selenophosphate linkage, and a boranophosphate linkage.

64. The compound or oligonucleotide of any one of claims 1-63, wherein one or more nucleoside linkages that link a base at position 3 or position 4 of the oligonucleotide are phosphodiester linkages.

65. The compound or oligonucleotide of claim 64, wherein only one nucleoside linkage that links a base at position 3 or position 4 of the oligonucleotide is a phosphodiester linkage.

66. The compound or oligonucleotide of any one of claims 1-63, wherein nucleoside linkages that link bases at both position 3 and position 4 of the oligonucleotide are phosphodiester linkages.

67. The compound or oligonucleotide of any one of claims 1-63, wherein one or more bases immediately preceding a spacer in the oligonucleotide are linked through phosphodiester bonds.

68. The compound or oligonucleotide of claim 67, wherein only the base immediately preceding the spacer in the oligonucleotide is linked to the spacer through a phosphodiester bond.

69. The compound or oligonucleotide of claim 68, wherein the base immediately preceding the spacer in the oligonucleotide is further linked to a further preceding base through a phosphodiester bond.

70. The compound or oligonucleotide of claim 68, wherein the oligonucleotide comprises a second spacer, wherein a base immediately preceding the second spacer is linked to a further preceding base through a phosphodiester bond.

71. The compound or oligonucleotide of any one of claims 1-63, wherein one or more bases immediately succeeding a spacer in the oligonucleotide are linked through phosphodiester bonds.

72. The compound or oligonucleotide of claim 71, wherein only the base immediately succeeding the spacer in the oligonucleotide is linked to the spacer through a phosphodiester bond.

73. The compound or oligonucleotide of claim 67, wherein two bases immediately preceding the spacer in the oligonucleotide are linked through phosphodiester bonds.

74. The compound or oligonucleotide of any one of claims 1-63, wherein one or more bases immediately preceding a spacer in the oligonucleotide are linked through phosphodiester bonds and wherein one or more bases immediately succeeding the spacer in the oligonucleotide are linked through phosphodiester bonds.

75. The compound or oligonucleotide of claim 74, wherein one base immediately preceding the spacer and one base immediately succeeding the spacer are linked through phosphodiester bonds.

76. The compound or oligonucleotide of claim 74 or 75, wherein the oligonucleotide includes a second spacer, and wherein one or more bases immediately preceding the second spacer in the oligonucleotide are linked through phosphodiester bonds and wherein one or more bases immediately succeeding the second spacer in the oligonucleotide are linked through phosphodiester bonds.

77. The compound or oligonucleotide of claim 76, wherein one base immediately preceding the second spacer and one base immediately succeeding the second spacer are linked through phosphodiester bonds.

78. The compound or oligonucleotide of any one of claims 1-63, wherein the oligonucleotide comprises a range of bases that are linked through phosphodiester bonds, the range of bases comprising at least two bases.

79. The compound or oligonucleotide of any one of claims 1-63, wherein the oligonucleotide comprises a range of bases that are linked through phosphodiester bonds, the range of bases comprising at least five bases.

80. The compound or oligonucleotide of claim 78 or 79, wherein the oligonucleotide comprises two or more spacers, and wherein the range of bases are positioned between the at least two spacers.

81. A compound comprising an oligonucleotide comprising a nucleobase sequence that shares at least 90% identity to an equal length portion of any one of SEQ ID NOs: 1-466, SEQ ID NOs: 893-1338, SEQ ID NOs: 1342-1366, or SEQ ID NOs: 1392-1664.

82. An oligonucleotide comprising a nucleobase sequence that shares at least 90% identity to an equal length portion of any one of SEQ ID NOs: 1-466, SEQ ID NOs: 893-1338, SEQ ID NOs: 1342-1366, or SEQ ID NOs: 1392-1664.

83. The compound of claim 81 or the oligonucleotide of claim 81 or 82, wherein the nucleobase sequence shares at least 95% identity to an equal length portion of any one of SEQ ID NOs: 1-466, SEQ ID NOs: 893-1338, SEQ ID NOs: 1342-1366, or SEQ ID NOs: 1392-1664.

84. The compound of claim 81 or the oligonucleotide of claim 81 or 82, wherein the nucleobase sequence shares at least 100% identity to an equal length portion of any one of SEQ ID NOs: 1-466, SEQ ID NOs: 893-1338, SEQ ID NOs: 1342-1366, or SEQ ID NOs: 1392-1664.

85. The compound or oligonucleotide of any of claims 64-84, wherein the oligonucleotide is any one of a 19mer, 21mer, 23mer, or 25mer.

86. The compound or oligonucleotide of any one of the above claims, wherein one or more internucleoside linkage of the oligonucleotide is a modified internucleoside linkage.

87. The compound or oligonucleotide of claim 86, wherein the modified internucleoside linkage of the oligonucleotide is a phosphorothioate linkage.

88. The compound or oligonucleotide of claim 86 or 87, wherein all internucleoside linkages of the oligonucleotide are phosphorothioate linkages.

89. The compound or oligonucleotide of claim 87, wherein the phosphorothioate linkage is in one of a Rp configuration or a Sp configuration.

90. The compound or oligonucleotide of any one of the preceding claims, wherein the oligonucleotide comprises at least one modified sugar moiety.

91. The compound or oligonucleotide of claim 90, wherein the modified sugar moiety is one of a 2′-OMe modified sugar moiety, bicyclic sugar moiety, 2′-O-(2-methoxyethyl) (2′-MOE), 2′-deoxy-2′-fluoro nucleoside, 2′-fluoro-β-D-arabinonucleoside, locked nucleic acid (LNA), constrained ethyl 2′-4′-bridged nucleic acid (cEt), S-cEt, tcDNA, hexitol nucleic acids (HNA), and tricyclic analog (e.g., tcDNA).

92. The compound or oligonucleotide of any one of the above claims, wherein the oligonucleotide exhibits at least a 30%, 40%, 50%, 60%, 70%, 80%, or 90% increase of full length STMN2 protein.

93. The compound or oligonucleotide of any one of the above claims, wherein the oligonucleotide exhibits at least a 100% increase of full length STMN2 protein.

94. The compound or oligonucleotide of any one of the above claims, wherein the oligonucleotide exhibits at least a 200% increase of full length STMN2 protein.

95. The compound or oligonucleotide of any one of the above claims, wherein the oligonucleotide exhibits at least a 300% increase of full length STMN2 protein.

96. The compound or oligonucleotide of any one of the above claims, wherein the oligonucleotide exhibits at least a 400% increase of full length STMN2 protein.

97. The compound or oligonucleotide of any one of claims 92-96, wherein increase of the full length STMN2 protein is measured in comparison to a reduced level of full length STMN2 protein achieved using a TDP43 antisense oligonucleotide.

98. The compound or oligonucleotide of any one of the above claims, wherein the oligonucleotide exhibits at least a 10%, 20%, 30%, 40%, 50%, 60%, 70%, 80%, 90%, or 100% rescue of full length STMN2 protein.

99. The compound or oligonucleotide of any one of the above claims, wherein the oligonucleotide exhibits at least a 50%, 60%, 70%, 80%, or 90% reduction of a STMN2 transcript with a cryptic exon.

100. A method of treating a neurological disease and/or a neuropathy in a patient in need thereof, the method comprising administering to the patient a compound or an oligonucleotide of any one of claims 1-99.

101. The method of claim 100, wherein the neurological disease selected from the group consisting of amyotrophic lateral sclerosis (ALS), frontotemporal dementia (FTD), ALS with FTD, Alzheimer's disease (AD), Parkinson's disease (PD), Huntington's disease, progressive supranuclear palsy (PSP), brain trauma, spinal cord injury, corticobasal degeneration (CBD), nerve injuries (e.g., brachial plexus injuries), neuropathies (e.g., chemotherapy induced neuropathy), and TDP43 proteinopathies (e.g., chronic traumatic encephalopathy, Perry Syndrome, Dementia with Lewy body in association with Alzheimer's disease, Parkinson's disease with or without dementia, and Limbic-predominant age-related TDP-43 encephalopathy (LATE)).

102. The method of claim 101, wherein the neurological disease is ALS.

103. The method of claim 101, wherein the neurological disease is FTD.

104. The method of claim 101, wherein the neurological disease is ALS with FTD.

105. The method of claim 100, wherein the neuropathy is chemotherapy induced neuropathy.

106. A method of restoring axonal outgrowth and/or regeneration of a neuron, the method comprising exposing the neuron to a compound or an oligonucleotide of any one of claims 1-99.

107. A method of increasing, promoting, stabilizing, or maintaining STMN2 expression and/or function in a neuron, the method comprising exposing the cell to a compound or an oligonucleotide of any one of claims 1-99.

108. The method of claim 106 or 107, wherein the neuron is a motor neuron.

109. The method of claim 106 or 107, wherein the neuron is a spinal cord neuron.

110. The method of any one of claims 106-109, wherein the neuron is a neuron of a patient in need of treatment of a neurological disease and/or a neuropathy.

111. The method of claim 110, wherein the neuropathy is chemotherapy induced neuropathy.

112. The method of any one of claims 106-111, wherein the exposing is performed in vivo or ex vivo.

113. The method of any one of claims 106-111, wherein the exposing comprises administering the oligonucleotide to a patient in need thereof.

114. The method of any one of claims 106-113, wherein the oligonucleotide is administered topically, parenterally, intrathecally, intrathalamically, intracisternally, orally, rectally, buccally, sublingually, vaginally, pulmonarily, intratracheally, intranasally, transdermally, or intraduodenally.

115. The method of claim 114, wherein the oligonucleotide is administered orally.

116. The method of any one of claims 106-114, wherein a therapeutically effective amount of the oligonucleotide is administered intrathecally, intrathalamically or intracisternally.

117. The method of any one of claims 106-116, wherein the patient is a human.

118. A pharmaceutical composition comprising the oligonucleotide of any one of claims 1-99, or a pharmaceutically acceptable salt thereof, and a pharmaceutically acceptable excipient.

119. The pharmaceutical composition of claim 118, wherein the pharmaceutical composition is suitable for topical, intrathecal, intrathalamic, intracisternal, intracerebroventricular, parenteral, oral, pulmonary, intratracheal, intranasal, transdermal, rectal, buccal, sublingual, vaginal, or intraduodenal administration.

120. A method of treating a neurological disease or a neuropathy in a patient in need thereof, the method comprising administering to a patient in need thereof a therapeutically effective amount of a pharmaceutical composition of claim 118 or 119.

121. The method of claim 120, wherein the neurological disease is selected from the group consisting of amyotrophic lateral sclerosis (ALS), frontotemporal dementia (FTD), ALS with FTD, Alzheimer's disease (AD), Parkinson's disease (PD), Huntington's disease, progressive supranuclear palsy (PSP), brain trauma, spinal cord injury, corticobasal degeneration (CBD), nerve injuries (e.g., brachial plexus injuries), neuropathies (e.g., chemotherapy induced neuropathy), and TDP43 proteinopathies (e.g., chronic traumatic encephalopathy, Perry Syndrome, Dementia with Lewy body in association with Alzheimer's disease, Parkinson's disease with or without dementia, and Limbic-predominant age-related TDP-43 encephalopathy (LATE)).

122. The method of claim 121, wherein the neurological disease is ALS.

123. The method of claim 121, wherein the neurological disease is FTD.

124. The method of claim 121, wherein the neurological disease is ALS with FTD.

125. The method of claim 120, wherein the neuropathy is chemotherapy induced neuropathy.

126. The method of any one of claims 120-125, wherein the pharmaceutical composition is administered topically, parenterally, orally, pulmonarily, rectally, buccally, sublingually, vaginally, intratracheally, intranasally, intracisternally, intrathecally, intrathalamically, transdermally, or intraduodenally.

127. The method of any one of claims 120-125, wherein the pharmaceutical composition is administered intrathecally, intrathalamically, or intracisternally.

128. The method of any one of claims 120-127, wherein a therapeutically effective amount of the oligonucleotide is administered intrathecally, intrathalamically or intracisternally.

129. The method of any one of claims 120-128, wherein the patient is human.

130. A method for treating a neurological disease in a subject in need thereof, the method comprising administering to the subject an oligonucleotide comprising a segment with at most 7 linked nucleosides, and wherein oligonucleotide shares at least 85% identity with any one of SEQ ID NOs: 1-466, SEQ ID NOs: 893-1338, SEQ ID NOs: 1342-1366, or SEQ ID NOs: 1392-1664, or a pharmaceutically acceptable salt thereof;
wherein at least one (i.e., one or more) nucleoside linkage of the oligonucleotide is independently selected from the group consisting of: a phosphodiester linkage, a phosphorothioate linkage, an alkyl phosphate linkage, a phosphorodithioate linkage, a phosphotriester linkage, an alkylphosphonate linkage, a 3-methoxypropyl phosphonate linkage, a methylphosphonate linkage, an aminoalkylphosphotriester linkage, an alkylene phosphonate linkage, a phosphinate linkage, a phosphoramidate linkage, a phosphoramidothioate linkage, a thiophosphorodiamidate linkage, a phosphorodiamidate linkage, an aminoalkylphosphoramidate linkage, a thiophosphoramidate linkage, a thionoalkylphosphonate linkage, a thionoalkylphosphotriester linkage, a thiophosphate linkage, a selenophosphate linkage, and a boranophosphate linkage, and/or
wherein at least one (i.e., one or more) nucleoside is substituted with a component selected from the group consisting of a 2′-O-(2-methoxyethyl) nucleoside, a 2′-O-methyl nucleoside, a 2′-deoxy-2′-fluoro nucleoside, a 2′-fluoro-β-D-arabinonucleoside, a locked nucleic acid (LNA), a tricyclic nucleic acid, constrained methoxyethyl (cMOE), constrained ethyl (cET), and a peptide nucleic acid (PNA) optionally, wherein the oligonucleotide further comprises a spacer.

131. A method for treating amyotrophic lateral sclerosis (ALS) in a subject in need thereof, the method comprising administering to the subject an oligonucleotide comprising a segment with at most 7 linked nucleosides, and wherein oligonucleotide shares at least 85% identity with any one of SEQ ID NOs: 1-466, SEQ ID NOs: 893-1338, SEQ ID NOs: 1342-1366, or SEQ ID NOs: 1392-1664, or a pharmaceutically acceptable salt thereof;
wherein at least one (i.e., one or more) nucleoside linkage of the oligonucleotide is independently selected from the group consisting of: a phosphodiester linkage, a phosphorothioate linkage, an alkyl phosphate linkage, a phosphorodithioate linkage, a phosphotriester linkage, an alkylphosphonate linkage, a 3-methoxypropyl phosphonate linkage, a methylphosphonate linkage, an aminoalkylphosphotriester linkage, an alkylene phosphonate linkage, a phosphinate linkage, a phosphoramidate linkage, a phosphoramidothioate linkage, a thiophosphorodiamidate linkage, a phosphorodiamidate linkage, an aminoalkylphosphoramidate linkage, a thiophosphoramidate linkage, a thionoalkylphosphonate linkage, a thionoalkylphosphotriester linkage, a thiophosphate linkage, a selenophosphate linkage, and a boranophosphate linkage, and/or
wherein at least one (i.e., one or more) nucleoside is substituted with a component selected from the group consisting of a 2′-O-(2-methoxyethyl) nucleoside, a 2′-O-methyl nucleoside, a 2′-deoxy-2′-fluoro nucleoside, a 2′-fluoro-β-D-arabinonucleoside, a locked nucleic acid (LNA), a tricyclic nucleic acid, constrained methoxyethyl (cMOE), constrained ethyl (cET), and a peptide nucleic acid (PNA)
optionally, wherein the oligonucleotide further comprises a spacer.

132. A method for treating frontotemporal dementia (FTD) in a subject in need thereof, the method comprising administering to the subject an oligonucleotide comprising a segment with at most 7 linked nucleosides, and wherein oligonucleotide shares at least 85% identity with any one of SEQ ID NOs: 1-466, SEQ ID NOs: 893-1338, SEQ ID NOs: 1342-1366, or SEQ ID NOs: 1392-1664, or a pharmaceutically acceptable salt thereof;
wherein at least one (i.e., one or more) nucleoside linkage of the oligonucleotide is independently selected from the group consisting of: a phosphodiester linkage, a phosphorothioate linkage, an alkyl phosphate linkage, a phosphorodithioate linkage, a phosphotriester linkage, an alkylphosphonate linkage, a 3-methoxypropyl phosphonate linkage, a methylphosphonate linkage, an aminoalkylphosphotriester linkage, an alkylene phosphonate linkage, a phosphinate linkage, a phosphoramidate linkage, a phosphoramidothioate linkage, a thiophosphorodiamidate linkage, a phosphorodiamidate linkage, an aminoalkylphosphoramidate linkage, a thiophosphoramidate linkage, a thionoalkylphosphonate linkage, a thionoalkylphosphotriester linkage, a thiophosphate linkage, a selenophosphate linkage, and a boranophosphate linkage, and/or
wherein at least one (i.e., one or more) nucleoside is substituted with a component selected from the group consisting of a 2′-O-(2-methoxyethyl) nucleoside, a 2′-O-methyl nucleoside, a 2′-deoxy-2′-fluoro nucleoside, a 2′-fluoro-β-D-arabinonucleoside, a locked nucleic acid (LNA), a tricyclic nucleic acid, constrained methoxyethyl (cMOE), constrained ethyl (cET), and a peptide nucleic acid (PNA)
optionally, wherein the oligonucleotide further comprises a spacer.

133. A method for treating amyotrophic lateral sclerosis (ALS) with frontotemporal dementia (FTD) in a subject in need thereof, the method comprising administering to the subject an oligonucleotide comprising a segment with at most 7 linked nucleosides, and wherein oligonucleotide shares at least 85% identity with any one of SEQ ID NOs: 1-466, SEQ ID NOs: 893-1338, SEQ ID NOs: 1342-1366, or SEQ ID NOs: 1392-1664, or a pharmaceutically acceptable salt thereof;
wherein at least one (i.e., one or more) nucleoside linkage of the oligonucleotide is independently selected from the group consisting of: a phosphodiester linkage, a phosphorothioate linkage, an alkyl phosphate linkage, a phosphorodithioate linkage, a phosphotriester linkage, an alkylphosphonate linkage, a 3-methoxypropyl phosphonate linkage, a methylphosphonate linkage, an aminoalkylphosphotriester linkage, an alkylene phosphonate linkage, a phosphinate linkage, a phosphoramidate linkage, a phosphoramidothioate linkage, a thiophosphorodiamidate linkage, a phosphorodiamidate linkage, an aminoalkylphosphoramidate linkage, a thiophosphoramidate linkage, a thionoalkylphosphonate linkage, a thionoalkylphosphotriester linkage, a thiophosphate linkage, a selenophosphate linkage, and a boranophosphate linkage, and/or
wherein at least one (i.e., one or more) nucleoside is substituted with a component selected from the group consisting of a 2′-O-(2-methoxyethyl) nucleoside, a 2′-O-methyl nucleoside, a 2′-deoxy-2′-fluoro nucleoside, a 2′-fluoro-β-D-arabinonucleoside, a locked nucleic acid (LNA), a tricyclic nucleic acid, constrained methoxyethyl (cMOE), constrained ethyl (cET), and a peptide nucleic acid (PNA)
optionally, wherein the oligonucleotide further comprises a spacer.

134. The method of any one of claims 130-133, wherein nucleoside linkages that link a base at position 3 or position 4 of the oligonucleotide are phosphodiester linkages.

135. The method of claim 134, wherein only one nucleoside linkage that links a base at position 3 or position 4 of the oligonucleotide is a phosphodiester linkage.

136. The method of any one of claims 130-133, wherein nucleoside linkages that link bases at both position 3 and position 4 of the oligonucleotide are phosphodiester linkages.

137. The method of any one of claims 130-133, wherein one or more bases immediately preceding a spacer in the oligonucleotide are linked through phosphodiester bonds.

138. The method of claim 137, wherein only the base immediately preceding the spacer in the oligonucleotide is linked to the spacer through a phosphodiester bond.

139. The method of claim 138, wherein the base immediately preceding the spacer in the oligonucleotide is further linked to a further preceding base through a phosphodiester bond.

140. The method of claim 138, wherein the oligonucleotide comprises a second spacer, wherein a base immediately preceding the second spacer is linked to a further preceding base through a phosphodiester bond.

141. The method of any one of claims 130-133, wherein one or more bases immediately succeeding a spacer in the oligonucleotide are linked through phosphodiester bonds.

142. The method of claim 141, wherein only the base immediately succeeding the spacer in the oligonucleotide is linked to the spacer through a phosphodiester bond.

143. The method of any one of claims 130-133, wherein two bases immediately preceding the spacer in the oligonucleotide are linked through phosphodiester bonds.

144. The method of any one of claims 130-133, wherein one or more bases immediately preceding a spacer in the oligonucleotide are linked through phosphodiester bonds and wherein one or more bases immediately succeeding the spacer in the oligonucleotide are linked through phosphodiester bonds.

145. The method of claim 144, wherein one base immediately preceding the spacer and one base immediately succeeding the spacer are linked through phosphodiester bonds.

146. The method of claim 144 or 145, wherein the oligonucleotide includes a second spacer, and wherein one or more bases immediately preceding the second spacer in the oligonucleotide are linked through phosphodiester bonds and wherein one or more bases immediately succeeding the second spacer in the oligonucleotide are linked through phosphodiester bonds.

147. The compound or oligonucleotide of claim 146, wherein one base immediately preceding the second spacer and one base immediately succeeding the second spacer are linked through phosphodiester bonds.

148. The method of any one of claims 130-133, wherein the oligonucleotide comprises a range of bases that are linked through phosphodiester bonds, the range of bases comprising at least two bases.

149. The method of any one of claims 130-133, wherein the oligonucleotide comprises a range of bases that are linked through phosphodiester bonds, the range of bases comprising at least five bases.

150. The method of claim 148 or 149, wherein the oligonucleotide comprises two or more spacers, and wherein the range of bases are positioned between the at least two spacers.

151. The method of any of claims 134-150, wherein the oligonucleotide is any one of a 19mer, 21mer, 23mer, or 25mer.

152. The method of any one of claims 130-133, wherein at least one (i.e., one or more) internucleoside linkage of the oligonucleotide is a phosphorothioate linkage.

153. The method of any one of claims 130-133, wherein all internucleoside linkages of the oligonucleotide are phosphorothioate linkages.

154. An oligonucleotide and a pharmaceutically acceptable excipient, the oligonucleotide comprising a sequence that is between 85 and 98% complementary to an equal length portion of any one of SEQ ID NO: 1339 or SEQ ID NO: 1341, a sequence having 90% identity thereof, or to a 15 to 50 contiguous nucleobase portion thereof, optionally wherein the oligonucleotide comprises a spacer and wherein the oligonucleotide is capable of increasing, restoring, or stabilizing expression of the STMN2 mRNA capable of translation of a functional STMN2 and/or activity and/or function of STMN2 protein in a cell or a human patient of an immune-mediated demyelinating disease, and wherein the level of increase, restoration, or stabilization of expression and/or activity and/or function is sufficient for use of the oligonucleotide as a medicament for the treatment of the immune-mediated demyelinating disease.

155. The method of any one of claim 100-117 or 120-153, the pharmaceutical composition of claim 118 or 119, or the oligonucleotide of any one of claim 1-99 or 154, wherein the oligonucleotide comprises one or more chiral centers and/or double bonds.

156. The method of any one of claim 100-117, 120-153, or 155, the pharmaceutical composition of claim 118, 119, or 155, or the oligonucleotide of any one of claim 1-99 or 154-155, wherein the oligonucleotide exist as stereoisomers selected from geometric isomers, enantiomers, and diastereomers.

157. A method of treating a neurological disease and/or a neuropathy in a patient in need thereof, the method comprising administering to a patient in need thereof a therapeutically effective amount of a pharmaceutical composition of claim 118 or 119, in combination with a second therapeutic agent.

158. The method of claim 157, wherein the second therapeutic agent is selected from Riluzole (Rilutek), Edaravone (Radicava), rivastigmine, donepezil, galantamine, selective serotonin reuptake inhibitor, antipsychotic agents, cholinesterase inhibitors, memantine, benzodiazepine antianxiety drugs, AMX0035 (ELYBRIO), ZILUCOPLAN (RA101495), pridopidine, dual AON intrathecal administration (e.g. BIIB067, BIIB078, and BIIB105), BIIB100, levodopa/carbidopa, dopaminergic agents (e.g., ropinirole, pramipexole, rotigotine), medroxyprogesetrone, KCNQ2/KCNQ3 openers (e.g., retigabine, XEN1101, or QRL-101), anticonvulsants and psychostimulant agents, and/or a therapy (e.g., selected from breathing care, physical therapy, occupational therapy, speech therapy, nutritional support), for treating said neurologic disease.

159. A method of treating a neurological disease and/or a neuropathy in a patient in need thereof, the method comprising administering to a patient in need thereof a therapeutically effective amount of a pharmaceutical composition of claim 118 or 119, wherein at least one nucleoside linkage of the oligonucleotide is a non-natural linkage, optionally wherein the oligonucleotide comprises a spacer, and wherein the oligonucleotide further comprises a targeting or conjugate moiety selected from cholesterol, lipoic acid, panthothenic acid, polyethylene glycol, and an antibody for crossing the blood brain barrier.

160. The method of any one of claim 100-117, 120-153, or 155-159, wherein the spacer is a nucleoside-replacement group comprising a non-sugar substitute that is incapable of linking to a nucleotide base.

161. The method of claim 160, wherein the spacer is located between positions 10 and 15 of the oligonucleotide.

162. The method of claim 160, wherein the spacer is located between positions 7 and 11 of the oligonucleotide.

163. The method of claim 160 or 162, wherein the oligonucleotide further comprises a second spacer, wherein the second spacer is located between positions 14 and 22 of the oligonucleotide.

164. The method of claim 163, wherein the spacer and the second spacer are separated by at least 5 nucleobases, at least 6 nucleobases, or at least 7 nucleobases in the oligonucleotide.

165. The method of claim 163 or 164, wherein the spacer is located between positions 7 and 9 of the oligonucleotide, and wherein the second spacer is located between positions 15 and 18 of the oligonucleotide.

166. The method of any one of claims 163-165, wherein the spacer is located at position 8 of the oligonucleotide, and wherein the second spacer is located at position 16 of the oligonucleotide.

167. The method of any one of claims 163-166, wherein the oligonucleotide further comprises a third spacer, wherein the third spacer is located between positions 21 and 24 of the oligonucleotide.

168. The method of claim 160, wherein the spacer is located between positions 2 and 5 of the oligonucleotide.

169. The method of claim 168, wherein the oligonucleotide further comprises a second spacer, wherein the second spacer is located between positions 8 and 12 of the oligonucleotide.

170. The method of claim 169, wherein the oligonucleotide further comprises a third spacer, wherein the third spacer is located between positions 18 and 22 of the oligonucleotide.

171. The method of claim 160, wherein the oligonucleotide further comprises a second spacer and a third spacer, wherein the three spacers are located at positions in the oligonucleotide such that each segment of the oligonucleotide has at most 7 linked nucleosides.

172. The method of claim 171, wherein at least two of the three spacers are adjacent to a guanine nucleobase.

173. The method of claim 172, wherein each of the at least two of the three spacers immediately precede a guanine nucleobase.

174. The method of any one of claims 160-173, wherein each of the first, second or third spacers is a nucleoside-replacement group comprising a non-sugar substitute wherein the non-sugar substitute does not contain a ketone, aldehyde, ketal, hemiketal, acetal, hemiacetal, aminal or hemiaminal moiety and is incapable of forming a covalent bond with a nucleotide base.

175. The method of any one of claims 160-173, wherein each of the first, second or third spacers is independently represented by Formula (X), wherein: [chemical structure]
Ring A is is an optionally substituted 4-8 member monocyclic cycloalkyl group or a 4-8 member monocyclic heterocyclyl group, wherein the heterocyclyl group contains 1 or 2 heteroatoms selected from O, S and N, provided that A is not capable of forming a covalent bond to a nucleobase; and
the [chemical structure]
symbol represents the point of connection to an internucleoside linkage.

176. The method of claim 175, wherein each of the first, second or third spacers is independently represented by Formula (Xa), wherein:

[chemical structure]

177. The method of claim 175 or 176, wherein ring A is an optionally substituted 4-8 member monocyclic cycloalkyl group selected from cyclobutyl, cyclopentyl, cyclohexyl, cycloheptyl and cyclooctyl; or a 4-8 member monocyclic heterocyclyl group, selected from oxetanyl, tetrahydrofuranyl, tetrahydropyranyl, 1,4-dioxanyl, pyrolidinyl, piperidinyl, piperazinyl, morpholinyl and azepanyl.

178. The method of claim 177, wherein ring A is tetrahydrofuranyl.

179. The method of claim 177, wherein ring A is tetrahydropyranyl.

180. The method of any one of claims 160-173 wherein each of the first, second or third spacers is independently represented by Formula (I), wherein: [chemical structure]
X is selected from —CH₂— and —O—; and
n is 0, 1, 2 or 3.

181. The method of any one of claims 160-173, wherein each of the first, second or third spacers is independently represented by Formula (I′), wherein:

[chemical structure]

182. The method of any one of claims 160-173, wherein each of the first, second or third spacers is independently represented by Formula (Ia), wherein:

[chemical structure]

183. The method of any one of claims 160-173, wherein each of the first, second or third spacers is independently represented by Formula (Ia′), wherein:

[chemical structure]

184. The method of any one of claims 160-173, wherein each of the first, second or third spacers is independently represented by Formula II, wherein: [chemical structure]
and
X is selected from —CH₂— and —O—.

185. The method of any one of claims 160-173, wherein each of the first, second or third spacers is independently represented by Formula II′, wherein: [chemical structure]
and
X is selected from —CH₂— and —O—.

186. The method of any one of claims 160-173, wherein each of the first, second or third spacers is independently represented by Formula (Ha), wherein:

[chemical structure]

187. The method of any one of claims 160-173, wherein each of the first, second or third spacers is independently represented by Formula (IIa′), wherein:

[chemical structure]

188. The method of any one of claims 160-173, wherein each of the first, second or third spacers is independently represented by Formula III, wherein: [chemical structure]
and
X is selected from —CH₂— and —O—.

189. The method of any one of claims 160-173, wherein each of the first, second or third spacers is independently represented by Formula III′, wherein: [chemical structure]
and
X is selected from —CH₂— and —O—.

190. The method of any one of claims 160-173, wherein each of the first, second or third spacers is independently represented by Formula (IIIa), wherein:

[chemical structure]

191. The method of any one of claims 160-173, wherein each of the first, second or third spacers is independently represented by Formula (IIIa′), wherein:

[chemical structure]

192. The method of any one of claims 160-191, wherein the oligonucleotide comprising the spacer has a GC content of at least 10%.

193. The method of any one of claims 160-192, wherein the oligonucleotide comprising the spacer has a GC content of at least 20%.

194. The method of any one of claims 160-193, wherein the oligonucleotide comprising the spacer has a GC content of at least 25%.

195. The method of any one of claims 160-194, wherein the oligonucleotide comprising the spacer has a GC content of at least 30%.

196. The method of any one of claims 160-195, wherein the oligonucleotide comprising the spacer has a GC content of at least 40%.

197. The method of any one of claims 160-196, wherein the oligonucleotide comprising the spacer has a GC content of at least 50%.
